United States Patent Application Publication US 2010/0226854 A1 - sequence listing, part 2

SEQ ID NO: 17801 - protein, 8 aa, BK virus
VWLHSMGK

SEQ ID NO: 17802 - protein, 8 aa, BK virus
WLHSMGKQ

SEQ ID NO: 17803 - protein, 8 aa, BK virus
LHSMGKQL

SEQ ID NO: 17804 - protein, 8 aa, BK virus
HSMGKQLL

SEQ ID NO: 17805 - protein, 8 aa, BK virus
SMGKQLLP

SEQ ID NO: 17806 - protein, 8 aa, BK virus
MGKQLLPV

SEQ ID NO: 17807 - protein, 8 aa, BK virus
GKQLLPVA

SEQ ID NO: 17808 - protein, 8 aa, BK virus
KQLLPVAF

SEQ ID NO: 17809 - protein, 8 aa, BK virus
QLLPVAFF

SEQ ID NO: 17810 - protein, 8 aa, BK virus
LLPVAFFF

SEQ ID NO: 17811 - protein, 8 aa, BK virus
LPVAFFFI

SEQ ID NO: 17812 - protein, 8 aa, BK virus
PVAFFFII

SEQ ID NO: 17813 - protein, 8 aa, BK virus
VAFFFIIY

SEQ ID NO: 17814 - protein, 8 aa, BK virus
AFFFIIYK

SEQ ID NO: 17815 - protein, 8 aa, BK virus
FFFIIYKR

SEQ ID NO: 17816 - protein, 8 aa, BK virus
FFIIYKRP

SEQ ID NO: 17817 - protein, 8 aa, BK virus
FIIYKRPR

SEQ ID NO: 17818 - protein, 8 aa, BK virus
IIYKRPRP

SEQ ID NO: 17819 - protein, 8 aa, BK virus
IYKRPRPP

SEQ ID NO: 17820 - protein, 8 aa, BK virus
YKRPRPPL

SEQ ID NO: 17821 - protein, 8 aa, BK virus
KRPRPPLP

SEQ ID NO: 17822 - protein, 8 aa, BK virus
RPRPPLPP

SEQ ID NO: 17823 - protein, 8 aa, BK virus
PRPPLPPP

SEQ ID NO: 17824 - protein, 8 aa, BK virus
RPPLPPPF

SEQ ID NO: 17825 - protein, 8 aa, BK virus
PPLPPPFL

SEQ ID NO: 17826 - protein, 8 aa, BK virus
PLPPPFLS

SEQ ID NO: 17827 - protein, 8 aa, BK virus
LPPPFLSS

SEQ ID NO: 17828 - protein, 8 aa, BK virus
PPPFLSSS

SEQ ID NO: 17829 - protein, 8 aa, BK virus
PPFLSSSK

SEQ ID NO: 17830 - protein, 8 aa, BK virus
PFLSSSKG

SEQ ID NO: 17831 - protein, 8 aa, BK virus
FLSSSKGV

SEQ ID NO: 17832 - protein, 8 aa, BK virus
LSSSKGVE

SEQ ID NO: 17833 - protein, 8 aa, BK virus
SSSKGVEA

SEQ ID NO: 17834 - protein, 8 aa, BK virus
SSKGVEAF

SEQ ID NO: 17835 - protein, 8 aa, BK virus
SKGVEAFS

SEQ ID NO: 17836 - protein, 8 aa, BK virus
KGVEAFSE

SEQ ID NO: 17837 - protein, 8 aa, BK virus
GVEAFSEA

SEQ ID NO: 17838 - protein, 8 aa, BK virus
QNYLGKSL

SEQ ID NO: 17839 - protein, 8 aa, BK virus
NYLGKSLF

SEQ ID NO: 17840 - protein, 8 aa, BK virus
YLGKSLFF

SEQ ID NO: 17841 - protein, 8 aa, BK virus
LGKSLFFC

SEQ ID NO: 17842 - protein, 8 aa, BK virus
GKSLFFCN

SEQ ID NO: 17843 - protein, 8 aa, BK virus
KSLFFCNF

SEQ ID NO: 17844 - protein, 8 aa, BK virus
SLFFCNFC

SEQ ID NO: 17845 - protein, 8 aa, BK virus
LFFCNFCK

SEQ ID NO: 17846 - protein, 9 aa, BK virus
WIKFLTGKN

SEQ ID NO: 17847 - protein, 9 aa, BK virus
IKFLTGKNP

SEQ ID NO: 17848 - protein, 9 aa, BK virus
KFLTGKNPW

SEQ ID NO: 17849 - protein, 9 aa, BK virus
FLTGKNPWS

SEQ ID NO: 17850 - protein, 9 aa, BK virus
LTGKNPWSS

SEQ ID NO: 17851 - protein, 9 aa, BK virus
TGKNPWSSW

SEQ ID NO: 17852 - protein, 9 aa, BK virus
GKNPWSSWT

SEQ ID NO: 17853 - protein, 9 aa, BK virus
KNPWSSWTF

SEQ ID NO: 17854 - protein, 9 aa, BK virus
ALKELPGEI

SEQ ID NO: 17855 - protein, 9 aa, BK virus
LKELPGEIF

SEQ ID NO: 17856 - protein, 9 aa, BK virus
KELPGEIFP

SEQ ID NO: 17857 - protein, 9 aa, BK virus
GSVRNFTLT

SEQ ID NO: 17858 - protein, 9 aa, BK virus
SVRNFTLTK

SEQ ID NO: 17859 - protein, 9 aa, BK virus
VRNFTLTKG

SEQ ID NO: 17860 - protein, 9 aa, BK virus
RNFTLTKGA

SEQ ID NO: 17861 - protein, 9 aa, BK virus
NFTLTKGAT

SEQ ID NO: 17862 - protein, 9 aa, BK virus
FTLTKGATR

SEQ ID NO: 17863 - protein, 9 aa, BK virus
TLTKGATRI

SEQ ID NO: 17864 - protein, 9 aa, BK virus
LTKGATRIK

SEQ ID NO: 17865 - protein, 9 aa, BK virus
ILCIKKWSR

SEQ ID NO: 17866 - protein, 9 aa, BK virus
LCIKKWSRM

SEQ ID NO: 17867 - protein, 9 aa, BK virus
LISLILEPG

SEQ ID NO: 17868 - protein, 9 aa, BK virus
ISLILEPGV

SEQ ID NO: 17869 - protein, 9 aa, BK virus
SLILEPGVA

SEQ ID NO: 17870 - protein, 9 aa, BK virus
LILEPGVAQ

SEQ ID NO: 17871 - protein, 9 aa, BK virus
ILEPGVAQR

SEQ ID NO: 17872 - protein, 9 aa, BK virus
LEPGVAQRF

SEQ ID NO: 17873 - protein, 9 aa, BK virus
EPGVAQRFV

SEQ ID NO: 17874 - protein, 9 aa, BK virus
PGVAQRFVL

SEQ ID NO: 17875 - protein, 9 aa, BK virus
GVAQRFVLI

SEQ ID NO: 17876 - protein, 9 aa, BK virus
VAQRFVLIF

SEQ ID NO: 17877 - protein, 9 aa, BK virus
AQRFVLIFL

SEQ ID NO: 17878 - protein, 9 aa, BK virus
QRFVLIFLF

SEQ ID NO: 17879 - protein, 9 aa, BK virus
RFVLIFLFA

SEQ ID NO: 17880 - protein, 9 aa, BK virus
FVLIFLFAQ

SEQ ID NO: 17881 - protein, 9 aa, BK virus
VLIFLFAQI

SEQ ID NO: 17882 - protein, 9 aa, BK virus
LIFLFAQIP

SEQ ID NO: 17883 - protein, 9 aa, BK virus
IFLFAQIPC

SEQ ID NO: 17884 - protein, 9 aa, BK virus
FLFAQIPCT

SEQ ID NO: 17885 - protein, 9 aa, BK virus
LFAQIPCTA

SEQ ID NO: 17886 - protein, 9 aa, BK virus
FAQIPCTAR

SEQ ID NO: 17887 - protein, 9 aa, BK virus
AQIPCTARN

SEQ ID NO: 17888 - protein, 9 aa, BK virus
QIPCTARNG

SEQ ID NO: 17889 - protein, 9 aa, BK virus
IPCTARNGL

SEQ ID NO: 17890 - protein, 9 aa, BK virus
PCTARNGLF

SEQ ID NO: 17891 - protein, 9 aa, BK virus
CTARNGLFV

SEQ ID NO: 17892 - protein, 9 aa, BK virus
TARNGLFVP

SEQ ID NO: 17893 - protein, 9 aa, BK virus
ARNGLFVPK

SEQ ID NO: 17894 - protein, 9 aa, BK virus
RNGLFVPKS

SEQ ID NO: 17895 - protein, 9 aa, BK virus
NGLFVPKSL

SEQ ID NO: 17896 - protein, 9 aa, BK virus
GLFVPKSLL

SEQ ID NO: 17897 - protein, 9 aa, BK virus
LFVPKSLLC

SEQ ID NO: 17898 - protein, 9 aa, BK virus
FVPKSLLCT

SEQ ID NO: 17899 - protein, 9 aa, BK virus
VPKSLLCTA

SEQ ID NO: 17900 - protein, 9 aa, BK virus
PKSLLCTAL

SEQ ID NO: 17901 - protein, 9 aa, BK virus
KSLLCTALA

SEQ ID NO: 17902 - protein, 9 aa, BK virus
SLLCTALAC

SEQ ID NO: 17903 - protein, 9 aa, BK virus
LLCTALACY

SEQ ID NO: 17904 - protein, 9 aa, BK virus
LCTALACYV

SEQ ID NO: 17905 - protein, 9 aa, BK virus
CTALACYVS

SEQ ID NO: 17906 - protein, 9 aa, BK virus
TALACYVSL

SEQ ID NO: 17907 - protein, 9 aa, BK virus
ALACYVSLD

SEQ ID NO: 17908 - protein, 9 aa, BK virus
IATALTASH

SEQ ID NO: 17909 - protein, 9 aa, BK virus
ATALTASHS

SEQ ID NO: 17910 - protein, 9 aa, BK virus
TALTASHSG

SEQ ID NO: 17911 - protein, 9 aa, BK virus
ALTASHSGL

SEQ ID NO: 17912 - protein, 9 aa, BK virus
LTASHSGLA

SEQ ID NO: 17913 - protein, 9 aa, BK virus
LKKLCNGGS

SEQ ID NO: 17914 - protein, 9 aa, BK virus
KKLCNGGSK

SEQ ID NO: 17915 - protein, 9 aa, BK virus
SFKVTNLYL

SEQ ID NO: 17916 - protein, 9 aa, BK virus
FKVTNLYLD

SEQ ID NO: 17917 - protein, 9 aa, BK virus
KVTNLYLDK

SEQ ID NO: 17918 - protein, 9 aa, BK virus
VIIFFIGAN

SEQ ID NO: 17919 - protein, 9 aa, BK virus
IIFFIGANL

SEQ ID NO: 17920 - protein, 9 aa, BK virus
IFFIGANLW

SEQ ID NO: 17921 - protein, 9 aa, BK virus
FFIGANLWN

SEQ ID NO: 17922 - protein, 9 aa, BK virus
FIGANLWNR

SEQ ID NO: 17923 - protein, 9 aa, BK virus
IGANLWNRR

SEQ ID NO: 17924 - protein, 9 aa, BK virus
GANLWNRRV

SEQ ID NO: 17925 - protein, 9 aa, BK virus
ANLWNRRVG

SEQ ID NO: 17926 - protein, 9 aa, BK virus
NLWNRRVGV

SEQ ID NO: 17927 - protein, 9 aa, BK virus
LWNRRVGVL

SEQ ID NO: 17928 - protein, 9 aa, BK virus
WNRRVGVLV

SEQ ID NO: 17929 - protein, 9 aa, BK virus
NRRVGVLVE

SEQ ID NO: 17930 - protein, 9 aa, BK virus
RRVGVLVEF

SEQ ID NO: 17931 - protein, 9 aa, BK virus
RVGVLVEFL

SEQ ID NO: 17932 - protein, 9 aa, BK virus
RSNSRFSTL

SEQ ID NO: 17933 - protein, 9 aa, BK virus
SNSRFSTLN

SEQ ID NO: 17934 - protein, 9 aa, BK virus
NSRFSTLNT

SEQ ID NO: 17935 - protein, 9 aa, BK virus
SRFSTLNTT

SEQ ID NO: 17936 - protein, 9 aa, BK virus
RFSTLNTTQ

SEQ ID NO: 17937 - protein, 9 aa, BK virus
FSTLNTTQK

SEQ ID NO: 17938 - protein, 9 aa, BK virus
STLNTTQKK

SEQ ID NO: 17939 - protein, 9 aa, BK virus
TLNTTQKKK

SEQ ID NO: 17940 - protein, 9 aa, BK virus
LNTTQKKKK

SEQ ID NO: 17941 - protein, 9 aa, BK virus
NTTQKKKKG

SEQ ID NO: 17942 - protein, 9 aa, BK virus
TTQKKKKGR

SEQ ID NO: 17943 - protein, 9 aa, BK virus
TQKKKKGRR

SEQ ID NO: 17944 - protein, 9 aa, BK virus
QKKKKGRRP

SEQ ID NO: 17945 - protein, 9 aa, BK virus
NPCLLCCVY

SEQ ID NO: 17946 - protein, 9 aa, BK virus
PCLLCCVYY

SEQ ID NO: 17947 - protein, 9 aa, BK virus
KTYGKIFCN

SEQ ID NO: 17948 - protein, 9 aa, BK virus
TYGKIFCNF

SEQ ID NO: 17949 - protein, 9 aa, BK virus
YGKIFCNFY

SEQ ID NO: 17950 - protein, 9 aa, BK virus
RSIPYYRRK

SEQ ID NO: 17951 - protein, 9 aa, BK virus
SIPYYRRKH

SEQ ID NO: 17952 - protein, 9 aa, BK virus
IPYYRRKHS

SEQ ID NO: 17953 - protein, 9 aa, BK virus
PYYRRKHSR

SEQ ID NO: 17954 - protein, 9 aa, BK virus
YYRRKHSRG

SEQ ID NO: 17955 - protein, 9 aa, BK virus
YRRKHSRGL

SEQ ID NO: 17956 - protein, 9 aa, BK virus
RRKHSRGLK

SEQ ID NO: 17957 - protein, 9 aa, BK virus
RKHSRGLKG

SEQ ID NO: 17958 - protein, 9 aa, BK virus
KHSRGLKGA

SEQ ID NO: 17959 - protein, 9 aa, BK virus
RNKAGVLEI

SEQ ID NO: 17960 - protein, 9 aa, BK virus
NKAGVLEIN

SEQ ID NO: 17961 - protein, 9 aa, BK virus
KAGVLEINY

SEQ ID NO: 17962 - protein, 9 aa, BK virus
GCVFIIRYV

SEQ ID NO: 17963 - protein, 9 aa, BK virus
CVFIIRYVF

SEQ ID NO: 17964 - protein, 9 aa, BK virus
VFIIRYVFR

SEQ ID NO: 17965 - protein, 9 aa, BK virus
FIIRYVFRI

SEQ ID NO: 17966 - protein, 9 aa, BK virus
IIRYVFRIS

SEQ ID NO: 17967 - protein, 9 aa, BK virus
IRYVFRISI

SEQ ID NO: 17968 - protein, 9 aa, BK virus
RYVFRISIQ

SEQ ID NO: 17969 - protein, 9 aa, BK virus
YVFRISIQC

SEQ ID NO: 17970 - protein, 9 aa, BK virus
VFRISIQCR

SEQ ID NO: 17971 - protein, 9 aa, BK virus
FRISIQCRG

SEQ ID NO: 17972 - protein, 9 aa, BK virus
RISIQCRGV

SEQ ID NO: 17973 - protein, 9 aa, BK virus
KVSEKRPAL

SEQ ID NO: 17974 - protein, 9 aa, BK virus
VSEKRPALS

SEQ ID NO: 17975 - protein, 9 aa, BK virus
SEKRPALSL

SEQ ID NO: 17976 - protein, 9 aa, BK virus
KALCKCYYF

SEQ ID NO: 17977 - protein, 9 aa, BK virus
ALCKCYYFC

SEQ ID NO: 17978 - protein, 9 aa, BK virus
LCKCYYFCR

SEQ ID NO: 17979 - protein, 9 aa, BK virus
CKCYYFCRK

SEQ ID NO: 17980 - protein, 9 aa, BK virus
KSKKYLSAS

SEQ ID NO: 17981 - protein, 9 aa, BK virus
SKKYLSASS

SEQ ID NO: 17982 - protein, 9 aa, BK virus
KKYLSASSR

SEQ ID NO: 17983 - protein, 9 aa, BK virus
KYLSASSRY

SEQ ID NO: 17984 - protein, 9 aa, BK virus
YLSASSRYS

SEQ ID NO: 17985 - protein, 9 aa, BK virus
LSASSRYSF

SEQ ID NO: 17986 - protein, 9 aa, BK virus
SASSRYSFS

SEQ ID NO: 17987 - protein, 9 aa, BK virus
KKSRYPSYD

SEQ ID NO: 17988 - protein, 9 aa, BK virus
KSRYPSYDQ

SEQ ID NO: 17989 - protein, 9 aa, BK virus
SRYPSYDQG

SEQ ID NO: 17990 - protein, 9 aa, BK virus
RYPSYDQGR

SEQ ID NO: 17991 - protein, 9 aa, BK virus
YPSYDQGRN

SEQ ID NO: 17992 - protein, 9 aa, BK virus
PSYDQGRNA

SEQ ID NO: 17993 - protein, 9 aa, BK virus
SYDQGRNAN

SEQ ID NO: 17994 - protein, 9 aa, BK virus
YDQGRNANR

SEQ ID NO: 17995 - protein, 9 aa, BK virus
DQGRNANRK

SEQ ID NO: 17996 - protein, 9 aa, BK virus
QGRNANRKI

SEQ ID NO: 17997 - protein, 9 aa, BK virus
GRNANRKIQ

SEQ ID NO: 17998 - protein, 9 aa, BK virus
RNANRKIQS

SEQ ID NO: 17999 - protein, 9 aa, BK virus
NANRKIQSY

SEQ ID NO: 18000 - protein, 9 aa, BK virus
ANRKIQSYI

SEQ ID NO: 18001 - protein, 9 aa, BK virus
NRKIQSYIR

SEQ ID NO: 18002 - protein, 9 aa, BK virus
NGFNIWSSW

SEQ ID NO: 18003 - protein, 9 aa, BK virus
GFNIWSSWK

SEQ ID NO: 18004 - protein, 9 aa, BK virus
FNIWSSWKC

SEQ ID NO: 18005 - protein, 9 aa, BK virus
NIWSSWKCC

SEQ ID NO: 18006 - protein, 9 aa, BK virus
IWSSWKCCT

SEQ ID NO: 18007 - protein, 9 aa, BK virus
WSSWKCCTR

SEQ ID NO: 18008 - protein, 9 aa, BK virus
SSWKCCTRT

SEQ ID NO: 18009 - protein, 9 aa, BK virus
SWKCCTRTI

SEQ ID NO: 18010 - protein, 9 aa, BK virus
WKCCTRTIY

SEQ ID NO: 18011 - protein, 9 aa, BK virus
KCCTRTIYG

SEQ ID NO: 18012 - protein, 9 aa, BK virus
CCTRTIYGR

SEQ ID NO: 18013 - protein, 9 aa, BK virus
CTRTIYGRC

SEQ ID NO: 18014 - protein, 9 aa, BK virus
TRTIYGRCC

SEQ ID NO: 18015 - protein, 9 aa, BK virus
RTIYGRCCL

SEQ ID NO: 18016 - protein, 9 aa, BK virus
TIYGRCCLA

SEQ ID NO: 18017 - protein, 9 aa, BK virus
IYGRCCLAA

SEQ ID NO: 18018 - protein, 9 aa, BK virus
YGRCCLAAL

SEQ ID NO: 18019 - protein, 9 aa, BK virus
GRCCLAALF

SEQ ID NO: 18020 - protein, 9 aa, BK virus
RCCLAALFA

SEQ ID NO: 18021 - protein, 9 aa, BK virus
CCLAALFAT

SEQ ID NO: 18022 - protein, 9 aa, BK virus
FFALYCFQC

SEQ ID NO: 18023 - protein, 9 aa, BK virus
FALYCFQCT

SEQ ID NO: 18024 - protein, 9 aa, BK virus
WKNNTSCRV

SEQ ID NO: 18025 - protein, 9 aa, BK virus
KNNTSCRVI

SEQ ID NO: 18026 - protein, 9 aa, BK virus
NNTSCRVIR

SEQ ID NO: 18027 - protein, 9 aa, BK virus
NTSCRVIRF

SEQ ID NO: 18028 - protein, 9 aa, BK virus
TSCRVIRFV

SEQ ID NO: 18029 - protein, 9 aa, BK virus
SCRVIRFVW

SEQ ID NO: 18030 - protein, 9 aa, BK virus
CRVIRFVWW

SEQ ID NO: 18031 - protein, 9 aa, BK virus
SLKCKPTHG

SEQ ID NO: 18032 - protein, 9 aa, BK virus
LKCKPTHGK

SEQ ID NO: 18033 - protein, 9 aa, BK virus
KCKPTHGKA

SEQ ID NO: 18034 - protein, 9 aa, BK virus
CKPTHGKAN

SEQ ID NO: 18035 - protein, 9 aa, BK virus
KPTHGKANL

SEQ ID NO: 18036 - protein, 9 aa, BK virus
ARCSYRSVH

SEQ ID NO: 18037 - protein, 9 aa, BK virus
RCSYRSVHG

SEQ ID NO: 18038 - protein, 9 aa, BK virus
CSYRSVHGC

SEQ ID NO: 18039 - protein, 9 aa, BK virus
SYRSVHGCF

SEQ ID NO: 18040 - protein, 9 aa, BK virus
IKGFAFRTW

SEQ ID NO: 18041 - protein, 9 aa, BK virus
KGFAFRTWN

SEQ ID NO: 18042 - protein, 9 aa, BK virus
GFAFRTWNK

SEQ ID NO: 18043 - protein, 9 aa, BK virus
FAFRTWNKQ

SEQ ID NO: 18044 - protein, 9 aa, BK virus
AFRTWNKQF

SEQ ID NO: 18045 - protein, 9 aa, BK virus
FRTWNKQFR

SEQ ID NO: 18046 - protein, 9 aa, BK virus
RTWNKQFRQ

SEQ ID NO: 18047 - protein, 9 aa, BK virus
TWNKQFRQF

SEQ ID NO: 18048 - protein, 9 aa, BK virus
WNKQFRQFE

SEQ ID NO: 18049 - protein, 9 aa, BK virus
NKQFRQFER

SEQ ID NO: 18050 - protein, 9 aa, BK virus
KQFRQFERL

SEQ ID NO: 18051 - protein, 9 aa, BK virus
QFRQFERLF

SEQ ID NO: 18052 - protein, 9 aa, BK virus
FRQFERLFR

SEQ ID NO: 18053 - protein, 9 aa, BK virus
RQFERLFRW

SEQ ID NO: 18054 - protein, 9 aa, BK virus
QFERLFRWK

SEQ ID NO: 18055 - protein, 9 aa, BK virus
FERLFRWKC

SEQ ID NO: 18056 - protein, 9 aa, BK virus
GKFRKETFK

SEQ ID NO: 18057 - protein, 9 aa, BK virus
KFRKETFKQ

SEQ ID NO: 18058 - protein, 9 aa, BK virus
FRKETFKQK

SEQ ID NO: 18059 - protein, 9 aa, BK virus
RKETFKQKN

SEQ ID NO: 18060 - protein, 9 aa, BK virus
KETFKQKNP

SEQ ID NO: 18061 - protein, 9 aa, BK virus
ETFKQKNPN

SEQ ID NO: 18062 - protein, 9 aa, BK virus
TFKQKNPNI

SEQ ID NO: 18063 - protein, 9 aa, BK virus
FKQKNPNIS

SEQ ID NO: 18064 - protein, 9 aa, BK virus
KQKNPNIST

SEQ ID NO: 18065 - protein, 9 aa, BK virus
QKNPNISTR

SEQ ID NO: 18066 - protein, 9 aa, BK virus
KNPNISTRL

SEQ ID NO: 18067 - protein, 9 aa, BK virus
NPNISTRLG

SEQ ID NO: 18068 - protein, 9 aa, BK virus
PNISTRLGY

SEQ ID NO: 18069 - protein, 9 aa, BK virus
NISTRLGYN

SEQ ID NO: 18070 - protein, 9 aa, BK virus
ISTRLGYNE

SEQ ID NO: 18071 - protein, 9 aa, BK virus
AQNIFKKIL

SEQ ID NO: 18072 - protein, 9 aa, BK virus
QNIFKKILT

SEQ ID NO: 18073 - protein, 9 aa, BK virus
NIFKKILTK

SEQ ID NO: 18074 - protein, 9 aa, BK virus
IFKKILTKL

SEQ ID NO: 18075 - protein, 9 aa, BK virus
FKKILTKLR

SEQ ID NO: 18076 - protein, 9 aa, BK virus
KKILTKLRV

SEQ ID NO: 18077 - protein, 9 aa, BK virus
KILTKLRVL

SEQ ID NO: 18078 - protein, 9 aa, BK virus
ILTKLRVLT

SEQ ID NO: 18079 - protein, 9 aa, BK virus
KKNFTKWND

SEQ ID NO: 18080 - protein, 9 aa, BK virus
KNFTKWNDL

SEQ ID NO: 18081 - protein, 9 aa, BK virus
NFTKWNDLV

SEQ ID NO: 18082 - protein, 9 aa, BK virus
FTKWNDLVA

SEQ ID NO: 18083 - protein, 9 aa, BK virus
TKWNDLVAT

SEQ ID NO: 18084 - protein, 9 aa, BK virus
KWNDLVATA

SEQ ID NO: 18085 - protein, 9 aa, BK virus
WNDLVATAN

SEQ ID NO: 18086 - protein, 9 aa, BK virus
NDLVATANL

SEQ ID NO: 18087 - protein, 9 aa, BK virus
DLVATANLV

SEQ ID NO: 18088 - protein, 9 aa, BK virus
DKYVYFFKD

SEQ ID NO: 18089 - protein, 9 aa, BK virus
KYVYFFKDE

SEQ ID NO: 18090 - protein, 9 aa, BK virus
YVYFFKDEI

SEQ ID NO: 18091 - protein, 9 aa, BK virus
YYKRRGFRN

SEQ ID NO: 18092 - protein, 9 aa, BK virus
IPITMLFPS

SEQ ID NO: 18093 - protein, 9 aa, BK virus
PITMLFPSL

SEQ ID NO: 18094 - protein, 9 aa, BK virus
ITMLFPSLR

SEQ ID NO: 18095 - protein, 9 aa, BK virus
TMLFPSLRY

SEQ ID NO: 18096 - protein, 9 aa, BK virus
MLFPSLRYF

SEQ ID NO: 18097 - protein, 9 aa, BK virus
LFPSLRYFS

SEQ ID NO: 18098 - protein, 9 aa, BK virus
FPSLRYFSP

SEQ ID NO: 18099 - protein, 9 aa, BK virus
PSLRYFSPC

SEQ ID NO: 18100 - protein, 9 aa, BK virus
NTTPKITQA

SEQ ID NO: 18101 - protein, 9 aa, BK virus
KWLIQKQHL

SEQ ID NO: 18102 - protein, 9 aa, BK virus
WLIQKQHLL

SEQ ID NO: 18103 - protein, 9 aa, BK virus
LIQKQHLLN

SEQ ID NO: 18104 - protein, 9 aa, BK virus
IQKQHLLNV

SEQ ID NO: 18105 - protein, 9 aa, BK virus
QKQHLLNVY

SEQ ID NO: 18106 - protein, 9 aa, BK virus
KQHLLNVYV

SEQ ID NO: 18107 - protein, 9 aa, BK virus
QHLLNVYVQ

SEQ ID NO: 18108 - protein, 9 aa, BK virus
KHLFKAFWF

SEQ ID NO: 18109 - protein, 9 aa, BK virus
HLFKAFWFA

SEQ ID NO: 18110 - protein, 9 aa, BK virus
LFKAFWFAI

SEQ ID NO: 18111 - protein, 9 aa, BK virus
FKAFWFAIV

SEQ ID NO: 18112 - protein, 9 aa, BK virus
KAFWFAIVP

SEQ ID NO: 18113 - protein, 9 aa, BK virus
AFWFAIVPV

SEQ ID NO: 18114 - protein, 9 aa, BK virus
FWFAIVPVC

SEQ ID NO: 18115 - protein, 9 aa, BK virus
WFAIVPVCQ

SEQ ID NO: 18116 - protein, 9 aa, BK virus
FAIVPVCQY

SEQ ID NO: 18117 - protein, 9 aa, BK virus
AIVPVCQYI

SEQ ID NO: 18118 - protein, 9 aa, BK virus
IVPVCQYIL

SEQ ID NO: 18119 - protein, 9 aa, BK virus
VPVCQYILS

SEQ ID NO: 18120 - protein, 9 aa, BK virus
PVCQYILSY

SEQ ID NO: 18121 - protein, 9 aa, BK virus
VCQYILSYL

SEQ ID NO: 18122 - protein, 9 aa, BK virus
CQYILSYLG

SEQ ID NO: 18123 - protein, 9 aa, BK virus
QYILSYLGP

SEQ ID NO: 18124 - protein, 9 aa, BK virus
YILSYLGPL

SEQ ID NO: 18125 - protein, 9 aa, BK virus
ILSYLGPLE

SEQ ID NO: 18126 - protein, 9 aa, BK virus
LSYLGPLEV

SEQ ID NO: 18127 - protein, 9 aa, BK virus
SYLGPLEVF

SEQ ID NO: 18128 - protein, 9 aa, BK virus
YLGPLEVFL

SEQ ID NO: 18129 - protein, 9 aa, BK virus
LGPLEVFLC

SEQ ID NO: 18130 - protein, 9 aa, BK virus
GPLEVFLCH

SEQ ID NO: 18131 - protein, 9 aa, BK virus
PLEVFLCHQ

SEQ ID NO: 18132 - protein, 9 aa, BK virus
LEVFLCHQT

SEQ ID NO: 18133 - protein, 9 aa, BK virus
EVFLCHQTP

SEQ ID NO: 18134 - protein, 9 aa, BK virus
PLLPGIPYH

SEQ ID NO: 18135 - protein, 9 aa, BK virus
LLPGIPYHT

SEQ ID NO: 18136 - protein, 9 aa, BK virus
AAHPLSGFS

SEQ ID NO: 18137 - protein, 9 aa, BK virus
AHPLSGFSC

SEQ ID NO: 18138 - protein, 9 aa, BK virus
HPLSGFSCL

SEQ ID NO: 18139 - protein, 9 aa, BK virus
GHLAKRKLG

SEQ ID NO: 18140 - protein, 9 aa, BK virus
HLAKRKLGK

SEQ ID NO: 18141 - protein, 9 aa, BK virus
LAKRKLGKD

SEQ ID NO: 18142 - protein, 9 aa, BK virus
AKRKLGKDS

SEQ ID NO: 18143 - protein, 9 aa, BK virus
KRKLGKDSL

SEQ ID NO: 18144 - protein, 9 aa, BK virus
RKLGKDSLQ

SEQ ID NO: 18145 - protein, 9 aa, BK virus
KLGKDSLQI

SEQ ID NO: 18146 - protein, 9 aa, BK virus
LGKDSLQIF

SEQ ID NO: 18147 - protein, 9 aa, BK virus
GKDSLQIFF

SEQ ID NO: 18148 - protein, 9 aa, BK virus
KDSLQIFFS

SEQ ID NO: 18149 - protein, 9 aa, BK virus
DSLQIFFSG

SEQ ID NO: 18150 - protein, 9 aa, BK virus
SLQIFFSGG

SEQ ID NO: 18151 - protein, 9 aa, BK virus
LQIFFSGGS

SEQ ID NO: 18152 - protein, 9 aa, BK virus
NILQGLSTV

SEQ ID NO: 18153 - protein, 9 aa, BK virus
ILQGLSTVV

SEQ ID NO: 18154 - protein, 9 aa, BK virus
LQGLSTVVF

SEQ ID NO: 18155 - protein, 9 aa, BK virus
QGLSTVVFQ

SEQ ID NO: 18156 - protein, 9 aa, BK virus
GLSTVVFQS

SEQ ID NO: 18157 - protein, 9 aa, BK virus
LSTVVFQSC

SEQ ID NO: 18158 - protein, 9 aa, BK virus
TGHKYQQLK

SEQ ID NO: 18159 - protein, 9 aa, BK virus
GHKYQQLKH

SEQ ID NO: 18160 - protein, 9 aa, BK virus
HKYQQLKHT

SEQ ID NO: 18161 - protein, 9 aa, BK virus
KYQQLKHTG

SEQ ID NO: 18162 - protein, 9 aa, BK virus
YQQLKHTGY

SEQ ID NO: 18163 - protein, 9 aa, BK virus
QQLKHTGYQ

SEQ ID NO: 18164 - protein, 9 aa, BK virus
QLKHTGYQL

SEQ ID NO: 18165 - protein, 9 aa, BK virus
LKHTGYQLY

SEQ ID NO: 18166 - protein, 9 aa, BK virus
KHTGYQLYK

SEQ ID NO: 18167 - protein, 9 aa, BK virus
HTGYQLYKE

SEQ ID NO: 18168 - protein, 9 aa, BK virus
TGYQLYKEA

SEQ ID NO: 18169 - protein, 9 aa, BK virus
GYQLYKEAP

SEQ ID NO: 18170 - protein, 9 aa, BK virus
YQLYKEAPH

SEQ ID NO: 18171 - protein, 9 aa, BK virus
QLYKEAPHP

SEQ ID NO: 18172 - protein, 9 aa, BK virus
LYKEAPHPV

SEQ ID NO: 18173 - protein, 9 aa, BK virus
YKEAPHPVH

SEQ ID NO: 18174 - protein, 9 aa, BK virus
KEAPHPVHL

SEQ ID NO: 18175 - protein, 9 aa, BK virus
EAPHPVHLA

SEQ ID NO: 18176 - protein, 9 aa, BK virus
APHPVHLAT

SEQ ID NO: 18177 - protein, 9 aa, BK virus
PHPVHLATL

SEQ ID NO: 18178 - protein, 9 aa, BK virus
HPVHLATLW

SEQ ID NO: 18179 - protein, 9 aa, BK virus
LCWSHEVLG

SEQ ID NO: 18180 - protein, 9 aa, BK virus
CWSHEVLGE

SEQ ID NO: 18181 - protein, 9 aa, BK virus
WSHEVLGEH

SEQ ID NO: 18182 - protein, 9 aa, BK virus
SHEVLGEHF

SEQ ID NO: 18183 - protein, 9 aa, BK virus
HEVLGEHFP

SEQ ID NO: 18184 - protein, 9 aa, BK virus
EVLGEHFPL

SEQ ID NO: 18185 - protein, 9 aa, BK virus
VLGEHFPLL

SEQ ID NO: 18186 - protein, 9 aa, BK virus
HFHFYWDQV

SEQ ID NO: 18187 - protein, 9 aa, BK virus
FHFYWDQVP

SEQ ID NO: 18188 - protein, 9 aa, BK virus
HFYWDQVPS

SEQ ID NO: 18189 - protein, 9 aa, BK virus
FYWDQVPST

SEQ ID NO: 18190 - protein, 9 aa, BK virus
YWDQVPSTQ

SEQ ID NO: 18191 - protein, 9 aa, BK virus
WDQVPSTQL

SEQ ID NO: 18192 - protein, 9 aa, BK virus
DQVPSTQLD

SEQ ID NO: 18193 - protein, 9 aa, BK virus
QVPSTQLDK

SEQ ID NO: 18194 - protein, 9 aa, BK virus
VPSTQLDKH

SEQ ID NO: 18195 - protein, 9 aa, BK virus
PSTQLDKHC

SEQ ID NO: 18196 - protein, 9 aa, BK virus
STQLDKHCF

SEQ ID NO: 18197 - protein, 9 aa, BK virus
TQLDKHCFC

SEQ ID NO: 18198 - protein, 9 aa, BK virus
QLDKHCFCP

SEQ ID NO: 18199 - protein, 9 aa, BK virus
LDKHCFCPN

SEQ ID NO: 18200 - protein, 9 aa, BK virus
DKHCFCPNR

SEQ ID NO: 18201 - protein, 9 aa, BK virus
KHCFCPNRP

SEQ ID NO: 18202 - protein, 9 aa, BK virus
HCFCPNRPY

SEQ ID NO: 18203 - protein, 9 aa, BK virus
CFCPNRPYG

SEQ ID NO: 18204 - protein, 9 aa, BK virus
FCPNRPYGQ

SEQ ID NO: 18205 - protein, 9 aa, BK virus
CPNRPYGQY

SEQ ID NO: 18206 - protein, 9 aa, BK virus
PNRPYGQYS

SEQ ID NO: 18207 - protein, 9 aa, BK virus
NRPYGQYSL

SEQ ID NO: 18208 - protein, 9 aa, BK virus
RPYGQYSLP

SEQ ID NO: 18209 - protein, 9 aa, BK virus
PYGQYSLPG

SEQ ID NO: 18210 - protein, 9 aa, BK virus
YGQYSLPGT

SEQ ID NO: 18211 - protein, 9 aa, BK virus
GQYSLPGTG

SEQ ID NO: 18212 - protein, 9 aa, BK virus
QYSLPGTGL

SEQ ID NO: 18213 - protein, 9 aa, BK virus
YSLPGTGLL

SEQ ID NO: 18214 - protein, 9 aa, BK virus
SLPGTGLLG

SEQ ID NO: 18215 - protein, 9 aa, BK virus
LPGTGLLGF

SEQ ID NO: 18216 - protein, 9 aa, BK virus
YHQGTLTCN

SEQ ID NO: 18217 - protein, 9 aa, BK virus
HQGTLTCNS

SEQ ID NO: 18218 - protein, 9 aa, BK virus
QGTLTCNSL

SEQ ID NO: 18219 - protein, 9 aa, BK virus
GTLTCNSLA

SEQ ID NO: 18220 - protein, 9 aa, BK virus
TLTCNSLAL

SEQ ID NO: 18221 - protein, 9 aa, BK virus
LTCNSLALP

SEQ ID NO: 18222 - protein, 9 aa, BK virus
TCNSLALPA

SEQ ID NO: 18223 - protein, 9 aa, BK virus
CNSLALPAF

SEQ ID NO: 18224 - protein, 9 aa, BK virus
NSLALPAFP

SEQ ID NO: 18225 - protein, 9 aa, BK virus
SLALPAFPR

SEQ ID NO: 18226 - protein, 9 aa, BK virus
LALPAFPRV

SEQ ID NO: 18227 - protein, 9 aa, BK virus
ALPAFPRVL

SEQ ID NO: 18228 - protein, 9 aa, BK virus
LPAFPRVLH

SEQ ID NO: 18229 - protein, 9 aa, BK virus
PAFPRVLHL

SEQ ID NO: 18230 - protein, 9 aa, BK virus
AFPRVLHLQ

SEQ ID NO: 18231 - protein, 9 aa, BK virus
FPRVLHLQQ

SEQ ID NO: 18232 - protein, 9 aa, BK virus
PRVLHLQQR

SEQ ID NO: 18233 - protein, 9 aa, BK virus
RVLHLQQRS

SEQ ID NO: 18234 - protein, 9 aa, BK virus
VLHLQQRSG

SEQ ID NO: 18235 - protein, 9 aa, BK virus
LHLQQRSGN

SEQ ID NO: 18236 - protein, 9 aa, BK virus
HLQQRSGNY

SEQ ID NO: 18237 - protein, 9 aa, BK virus
LQQRSGNYC

SEQ ID NO: 18238 - protein, 9 aa, BK virus
QQRSGNYCL

SEQ ID NO: 18239 - protein, 9 aa, BK virus
QRSGNYCLE

SEQ ID NO: 18240 - protein, 9 aa, BK virus
VFLHHAHAL

SEQ ID NO: 18241 - protein, 9 aa, BK virus
FLHHAHALF

SEQ ID NO: 18242 - protein, 9 aa, BK virus
LHHAHALFV

SEQ ID NO: 18243 - protein, 9 aa, BK virus
HHAHALFVT

SEQ ID NO: 18244 - protein, 9 aa, BK virus
HAHALFVTL

SEQ ID NO: 18245 - protein, 9 aa, BK virus
AHALFVTLH

SEQ ID NO: 18246 - protein, 9 aa, BK virus
HALFVTLHE

SEQ ID NO: 18247 - protein, 9 aa, BK virus
ALFVTLHEG

SEQ ID NO: 18248 - protein, 9 aa, BK virus
PLFVQLQPP

SEQ ID NO: 18249 - protein, 9 aa, BK virus
LFVQLQPPT

SEQ ID NO: 18250 - protein, 9 aa, BK virus
FVQLQPPTS

SEQ ID NO: 18251 - protein, 9 aa, BK virus
VQLQPPTSV

SEQ ID NO: 18252 - protein, 9 aa, BK virus
QLQPPTSVD

SEQ ID NO: 18253 - protein, 9 aa, BK virus
LQPPTSVDF

SEQ ID NO: 18254 - protein, 9 aa, BK virus
QPPTSVDFH

SEQ ID NO: 18255 - protein, 9 aa, BK virus
PPTSVDFHR

SEQ ID NO: 18256 - protein, 9 aa, BK virus
PTSVDFHRL

SEQ ID NO: 18257 - protein, 9 aa, BK virus
TSVDFHRLG

SEQ ID NO: 18258 - protein, 9 aa, BK virus
SVDFHRLGP

SEQ ID NO: 18259 - protein, 9 aa, BK virus
VDFHRLGPH

SEQ ID NO: 18260 - protein, 9 aa, BK virus
DFHRLGPHL

SEQ ID NO: 18261 - protein, 9 aa, BK virus
FHRLGPHLN

SEQ ID NO: 18262 - protein, 9 aa, BK virus
HRLGPHLNW

SEQ ID NO: 18263 - protein, 9 aa, BK virus
RLGPHLNWG

SEQ ID NO: 18264 - protein, 9 aa, BK virus
LGPHLNWGG

SEQ ID NO: 18265 - protein, 9 aa, BK virus
GPHLNWGGE

SEQ ID NO: 18266 - protein, 9 aa, BK virus
PHLNWGGEF

SEQ ID NO: 18267 - protein, 9 aa, BK virus
HLNWGGEFL

SEQ ID NO: 18268 - protein, 9 aa, BK virus
LNWGGEFLL

SEQ ID NO: 18269 - protein, 9 aa, BK virus
NWGGEFLLC

SEQ ID NO: 18270 - protein, 9 aa, BK virus
WGGEFLLCC

SEQ ID NO: 18271 - protein, 9 aa, BK virus
GGEFLLCCN

SEQ ID NO: 18272 - protein, 9 aa, BK virus
GEFLLCCNR

SEQ ID NO: 18273 - protein, 9 aa, BK virus
EFLLCCNRE

SEQ ID NO: 18274 - protein, 9 aa, BK virus
FLLCCNREA

SEQ ID NO: 18275 - protein, 9 aa, BK virus
LLCCNREAF

SEQ ID NO: 18276 - protein, 9 aa, BK virus
LCCNREAFF

SEQ ID NO: 18277 - protein, 9 aa, BK virus
CCNREAFFS

SEQ ID NO: 18278 - protein, 9 aa, BK virus
CNREAFFSL

SEQ ID NO: 18279 - protein, 9 aa, BK virus
NREAFFSLG

SEQ ID NO: 18280 - protein, 9 aa, BK virus
REAFFSLGY

SEQ ID NO: 18281 - protein, 9 aa, BK virus
EAFFSLGYH

SEQ ID NO: 18282 - protein, 9 aa, BK virus
AFFSLGYHC

SEQ ID NO: 18283 - protein, 9 aa, BK virus
SHFQHLALD

SEQ ID NO: 18284 - protein, 9 aa, BK virus
GFHLDPPFL

SEQ ID NO: 18285 - protein, 9 aa, BK virus
FHLDPPFLG

SEQ ID NO: 18286 - protein, 9 aa, BK virus
HLDPPFLGL

SEQ ID NO: 18287 - protein, 9 aa, BK virus
LDPPFLGLG

SEQ ID NO: 18288 - protein, 9 aa, BK virus
DPPFLGLGS

SEQ ID NO: 18289 - protein, 9 aa, BK virus
PPFLGLGSI

SEQ ID NO: 18290 - protein, 9 aa, BK virus
PFLGLGSIL

SEQ ID NO: 18291 - protein, 9 aa, BK virus
FLGLGSILP

SEQ ID NO: 18292 - protein, 9 aa, BK virus
LGLGSILPL

SEQ ID NO: 18293 - protein, 9 aa, BK virus
LLELLLLLL

SEQ ID NO: 18294 - protein, 9 aa, BK virus
LELLLLLLL

SEQ ID NO: 18295 - protein, 9 aa, BK virus
ELLLLLLLV

SEQ ID NO: 18296 - protein, 9 aa, BK virus
LLLLLLLVV

SEQ ID NO: 18297 - protein, 9 aa, BK virus
LLLLLLVVL

SEQ ID NO: 18298 - protein, 9 aa, BK virus
LLLLLVVLA

SEQ ID NO: 18299 - protein, 9 aa, BK virus
LLLLVVLAL

SEQ ID NO: 18300 - protein, 9 aa, BK virus
LLLVVLALA

SEQ ID NO: 18301 - protein, 9 aa, BK virus
LLVVLALAR

SEQ ID NO: 18302 - protein, 9 aa, BK virus
LVVLALARV

SEQ ID NO: 18303 - protein, 9 aa, BK virus
VVLALARVP

SEQ ID NO: 18304 - protein, 9 aa, BK virus
VLALARVPL

SEQ ID NO: 18305 - protein, 9 aa, BK virus
LALARVPLA

SEQ ID NO: 18306 - protein, 9 aa, BK virus
ALARVPLAF

SEQ ID NO: 18307 - protein, 9 aa, BK virus
LARVPLAFW

SEQ ID NO: 18308 - protein, 9 aa, BK virus
ARVPLAFWE

SEQ ID NO: 18309 - protein, 9 aa, BK virus
RVPLAFWEL

SEQ ID NO: 18310 - protein, 9 aa, BK virus
VPLAFWELP

SEQ ID NO: 18311 - protein, 9 aa, BK virus
PLAFWELPL

SEQ ID NO: 18312 - protein, 9 aa, BK virus
LAFWELPLD

SEQ ID NO: 18313 - protein, 9 aa, BK virus
AFWELPLDT

SEQ ID NO: 18314 - protein, 9 aa, BK virus
FWELPLDTL

SEQ ID NO: 18315 - protein, 9 aa, BK virus
WELPLDTLL

SEQ ID NO: 18316 - protein, 9 aa, BK virus
ELPLDTLLF

SEQ ID NO: 18317 - protein, 9 aa, BK virus
LPLDTLLFF

SEQ ID NO: 18318 - protein, 9 aa, BK virus
PLDTLLFFW

SEQ ID NO: 18319 - protein, 9 aa, BK virus
LDTLLFFWL

SEQ ID NO: 18320 - protein, 9 aa, BK virus
DTLLFFWLG

SEQ ID NO: 18321 - protein, 9 aa, BK virus
TLLFFWLGP

SEQ ID NO: 18322 - protein, 9 aa, BK virus
LLFFWLGPS

SEQ ID NO: 18323 - protein, 9 aa, BK virus
LFFWLGPSS

SEQ ID NO: 18324 - protein, 9 aa, BK virus
FFWLGPSSY

SEQ ID NO: 18325 - protein, 9 aa, BK virus
FWLGPSSYA

SEQ ID NO: 18326 - protein, 9 aa, BK virus
WLGPSSYAS

SEQ ID NO: 18327 - protein, 9 aa, BK virus
LGPSSYASR

SEQ ID NO: 18328 - protein, 9 aa, BK virus
GPSSYASRA

SEQ ID NO: 18329 - protein, 9 aa, BK virus
PSSYASRAG

SEQ ID NO: 18330 - protein, 9 aa, BK virus
SSYASRAGV

SEQ ID NO: 18331 - protein, 9 aa, BK virus
SYASRAGVT

SEQ ID NO: 18332 - protein, 9 aa, BK virus
YASRAGVTV

SEQ ID NO: 18333 - protein, 9 aa, BK virus
ASRAGVTVP

SEQ ID NO: 18334 - protein, 9 aa, BK virus
SRAGVTVPY

SEQ ID NO: 18335 - protein, 9 aa, BK virus
RAGVTVPYR

SEQ ID NO: 18336 - protein, 9 aa, BK virus
AGVTVPYRP

SEQ ID NO: 18337 - protein, 9 aa, BK virus
GVTVPYRPR

SEQ ID NO: 18338 - protein, 9 aa, BK virus
VTVPYRPRS

SEQ ID NO: 18339 - protein, 9 aa, BK virus
TVPYRPRSK

SEQ ID NO: 18340 - protein, 9 aa, BK virus
VPYRPRSKG

SEQ ID NO: 18341 - protein, 9 aa, BK virus
PYRPRSKGN

SEQ ID NO: 18342 - protein, 9 aa, BK virus
YRPRSKGNI

SEQ ID NO: 18343 - protein, 9 aa, BK virus
RPRSKGNIH

SEQ ID NO: 18344 - protein, 9 aa, BK virus
LAPPGAIVF

SEQ ID NO: 18345 - protein, 9 aa, BK virus
APPGAIVFS

SEQ ID NO: 18346 - protein, 9 aa, BK virus
PPGAIVFSI

SEQ ID NO: 18347 - protein, 9 aa, BK virus
PGAIVFSIN

SEQ ID NO: 18348 - protein, 9 aa, BK virus
GAIVFSINS

SEQ ID NO: 18349 - protein, 9 aa, BK virus
AIVFSINSP

SEQ ID NO: 18350 - protein, 9 aa, BK virus
IVFSINSPE

SEQ ID NO: 18351 - protein, 9 aa, BK virus
VFSINSPEC

SEQ ID NO: 18352 - protein, 9 aa, BK virus
FSINSPECT

SEQ ID NO: 18353 - protein, 9 aa, BK virus
SINSPECTL

SEQ ID NO: 18354 - protein, 9 aa, BK virus
INSPECTLC

SEQ ID NO: 18355 - protein, 9 aa, BK virus
FLKSILCVT

SEQ ID NO: 18356 - protein, 9 aa, BK virus
LKSILCVTS

SEQ ID NO: 18357 - protein, 9 aa, BK virus
KSILCVTSS

SEQ ID NO: 18358 - protein, 9 aa, BK virus
SILCVTSSI

SEQ ID NO: 18359 - protein, 9 aa, BK virus
ILCVTSSIL

SEQ ID NO: 18360 - protein, 9 aa, BK virus
LCVTSSILS

SEQ ID NO: 18361 - protein, 9 aa, BK virus
CVTSSILSA

SEQ ID NO: 18362 - protein, 9 aa, BK virus
VTSSILSAS

SEQ ID NO: 18363 - protein, 9 aa, BK virus
TSSILSASS

SEQ ID NO: 18364 - protein, 9 aa, BK virus
SSILSASSI

SEQ ID NO: 18365 - protein, 9 aa, BK virus
SILSASSIL

SEQ ID NO: 18366 - protein, 9 aa, BK virus
VWPKCTRVP

SEQ ID NO: 18367 - protein, 9 aa, BK virus
WPKCTRVPS

SEQ ID NO: 18368 - protein, 9 aa, BK virus
PKCTRVPSL

SEQ ID NO: 18369 - protein, 9 aa, BK virus
KCTRVPSLS

SEQ ID NO: 18370 - protein, 9 aa, BK virus
CTRVPSLSA

SEQ ID NO: 18371 - protein, 9 aa, BK virus
TRVPSLSAT

SEQ ID NO: 18372 - protein, 9 aa, BK virus
RVPSLSATC

SEQ ID NO: 18373 - protein, 9 aa, BK virus
VPSLSATCL

SEQ ID NO: 18374 - protein, 9 aa, BK virus
PSLSATCLT

SEQ ID NO: 18375 - protein, 9 aa, BK virus
SLSATCLTI

SEQ ID NO: 18376 - protein, 9 aa, BK virus
LSATCLTIE

SEQ ID NO: 18377 - protein, 9 aa, BK virus
SATCLTIEG

SEQ ID NO: 18378 - protein, 9 aa, BK virus
ATCLTIEGL

SEQ ID NO: 18379 - protein, 9 aa, BK virus
TCLTIEGLI

SEQ ID NO: 18380 - protein, 9 aa, BK virus
CLTIEGLIG

SEQ ID NO: 18381 - protein, 9 aa, BK virus
LTIEGLIGE

SEQ ID NO: 18382 - protein, 9 aa, BK virus
TIEGLIGER

SEQ ID NO: 18383 - protein, 9 aa, BK virus
IEGLIGERS

SEQ ID NO: 18384 - protein, 9 aa, BK virus
EGLIGERSE

SEQ ID NO: 18385 - protein, 9 aa, BK virus
KFIGAFTIV

SEQ ID NO: 18386 - protein, 9 aa, BK virus
FIGAFTIVQ

SEQ ID NO: 18387 - protein, 9 aa, BK virus
IGAFTIVQV

SEQ ID NO: 18388 - protein, 9 aa, BK virus
GAFTIVQVV

SEQ ID NO: 18389 - protein, 9 aa, BK virus
AFTIVQVVS

SEQ ID NO: 18390 - protein, 9 aa, BK virus
FTIVQVVSS

SEQ ID NO: 18391 - protein, 9 aa, BK virus
TIVQVVSSK

SEQ ID NO: 18392 - protein, 9 aa, BK virus
IVQVVSSKN

SEQ ID NO: 18393 - protein, 9 aa, BK virus
VQVVSSKNL

SEQ ID NO: 18394 - protein, 9 aa, BK virus
QVVSSKNLA

SEQ ID NO: 18395 - protein, 9 aa, BK virus
VVSSKNLAK

SEQ ID NO: 18396 - protein, 9 aa, BK virus
VSSKNLAKE

SEQ ID NO: 18397 - protein, 9 aa, BK virus
SSKNLAKES

SEQ ID NO: 18398 - protein, 9 aa, BK virus
SKNLAKESL

SEQ ID NO: 18399 - protein, 9 aa, BK virus
KNLAKESLK

SEQ ID NO: 18400 - protein, 9 aa, BK virus
NLAKESLKN

SEQ ID NO: 18401 - protein, 9 aa, BK virus
LAKESLKNL

SEQ ID NO: 18402 - protein, 9 aa, BK virus
AKESLKNLS

SEQ ID NO: 18403 - protein, 9 aa, BK virus
KESLKNLSV

SEQ ID NO: 18404 - protein, 9 aa, BK virus
ESLKNLSVL

SEQ ID NO: 18405 - protein, 9 aa, BK virus
SLKNLSVLL

SEQ ID NO: 18406 - protein, 9 aa, BK virus
LKNLSVLLC

SEQ ID NO: 18407 - protein, 9 aa, BK virus
KNLSVLLCN

SEQ ID NO: 18408 - protein, 9 aa, BK virus
NLSVLLCNS

SEQ ID NO: 18409 - protein, 9 aa, BK virus
LSVLLCNSC

SEQ ID NO: 18410 - protein, 9 aa, BK virus
SVLLCNSCE

SEQ ID NO: 18411 - protein, 9 aa, BK virus
VLLCNSCEV

SEQ ID NO: 18412 - protein, 9 aa, BK virus
LLCNSCEVI

SEQ ID NO: 18413 - protein, 9 aa, BK virus
LCNSCEVIE

SEQ ID NO: 18414 - protein, 9 aa, BK virus
CNSCEVIEG

SEQ ID NO: 18415 - protein, 9 aa, BK virus
NSCEVIEGI

SEQ ID NO: 18416 - protein, 9 aa, BK virus
SCEVIEGIS

SEQ ID NO: 18417 - protein, 9 aa, BK virus
CEVIEGISS

SEQ ID NO: 18418 - protein, 9 aa, BK virus
EVIEGISSL

SEQ ID NO: 18419 - protein, 9 aa, BK virus
VIEGISSLI

SEQ ID NO: 18420 - protein, 9 aa, BK virus
IEGISSLIT

SEQ ID NO: 18421 - protein, 9 aa, BK virus
EGISSLITC

SEQ ID NO: 18422 - protein, 9 aa, BK virus
GISSLITCH

SEQ ID NO: 18423 - protein, 9 aa, BK virus
ISSLITCHK

SEQ ID NO: 18424 - protein, 9 aa, BK virus
SSLITCHKA

SEQ ID NO: 18425 - protein, 9 aa, BK virus
SLITCHKAW

SEQ ID NO: 18426 - protein, 9 aa, BK virus
LITCHKAWE

SEQ ID NO: 18427 - protein, 9 aa, BK virus
ITCHKAWEI

SEQ ID NO: 18428 - protein, 9 aa, BK virus
TCHKAWEIV

SEQ ID NO: 18429 - protein, 9 aa, BK virus
CHKAWEIVA

SEQ ID NO: 18430 - protein, 9 aa, BK virus
HKAWEIVAN

SEQ ID NO: 18431 - protein, 9 aa, BK virus
KAWEIVANK

SEQ ID NO: 18432 - protein, 9 aa, BK virus
AWEIVANKE

SEQ ID NO: 18433 - protein, 9 aa, BK virus
WEIVANKEG

SEQ ID NO: 18434 - protein, 9 aa, BK virus
EIVANKEGP

SEQ ID NO: 18435 - protein, 9 aa, BK virus
IVANKEGPQ

SEQ ID NO: 18436 - protein, 9 aa, BK virus
VANKEGPQC

SEQ ID NO: 18437 - protein, 9 aa, BK virus
ANKEGPQCL

SEQ ID NO: 18438 - protein, 9 aa, BK virus
NKEGPQCLG

SEQ ID NO: 18439 - protein, 9 aa, BK virus
KEGPQCLGS

SEQ ID NO: 18440 - protein, 9 aa, BK virus
EGPQCLGSR

SEQ ID NO: 18441 - protein, 9 aa, BK virus
GPQCLGSRY

SEQ ID NO: 18442 - protein, 9 aa, BK virus
ILLTKVFTP

SEQ ID NO: 18443 - protein, 9 aa, BK virus
LLTKVFTPG

SEQ ID NO: 18444 - protein, 9 aa, BK virus
LTKVFTPGN

SEQ ID NO: 18445 - protein, 9 aa, BK virus
TKVFTPGNR

SEQ ID NO: 18446 - protein, 9 aa, BK virus
KVFTPGNRI

SEQ ID NO: 18447 - protein, 9 aa, BK virus
VFTPGNRIS

SEQ ID NO: 18448 - protein, 9 aa, BK virus
YSSGLNNSK

SEQ ID NO: 18449 - protein, 9 aa, BK virus
SSGLNNSKA

SEQ ID NO: 18450 - protein, 9 aa, BK virus
SGLNNSKAM

SEQ ID NO: 18451 - protein, 9 aa, BK virus
GLNNSKAMP

SEQ ID NO: 18452 - protein, 9 aa, BK virus
LNNSKAMPD

SEQ ID NO: 18453 - protein, 9 aa, BK virus
NNSKAMPDC

SEQ ID NO: 18454 - protein, 9 aa, BK virus
SQSSKNLYP

SEQ ID NO: 18455 - protein, 9 aa, BK virus
QSSKNLYPT

SEQ ID NO: 18456 - protein, 9 aa, BK virus
AKELIPLTV

SEQ ID NO: 18457 - protein, 9 aa, BK virus
IKAANPAIA

SEQ ID NO: 18458 - protein, 9 aa, BK virus
KAANPAIAP

SEQ ID NO: 18459 - protein, 9 aa, BK virus
AANPAIAPG

SEQ ID NO: 18460 - protein, 9 aa, BK virus
ANPAIAPGA

SEQ ID NO: 18461 - protein, 9 aa, BK virus
NPAIAPGAP

SEQ ID NO: 18462 - protein, 9 aa, BK virus
PAIAPGAPA

SEQ ID NO: 18463 - protein, 9 aa, BK virus
AIAPGAPAI

SEQ ID NO: 18464 - protein, 9 aa, BK virus
IAPGAPAIT

SEQ ID NO: 18465 - protein, 9 aa, BK virus
APGAPAITA

SEQ ID NO: 18466 - protein, 9 aa, BK virus
PGAPAITAY

SEQ ID NO: 18467 - protein, 9 aa, BK virus
GAPAITAYV

SEQ ID NO: 18468 - protein, 9 aa, BK virus
GVRPIAAIA

SEQ ID NO: 18469 - protein, 9 aa, BK virus
VRPIAAIAS

SEQ ID NO: 18470 - protein, 9 aa, BK virus
RPIAAIASE

SEQ ID NO: 18471 - protein, 9 aa, BK virus
PIAAIASEV

SEQ ID NO: 18472 - protein, 9 aa, BK virus
IAAIASEVL

SEQ ID NO: 18473 - protein, 9 aa, BK virus
AAIASEVLV

SEQ ID NO: 18474 - protein, 9 aa, BK virus
AIASEVLVM

SEQ ID NO: 18475 - protein, 9 aa, BK virus
IASEVLVMP

SEQ ID NO: 18476 - protein, 9 aa, BK virus
ASEVLVMPS

SEQ ID NO: 18477 - protein, 9 aa, BK virus
SEVLVMPST

SEQ ID NO: 18478 - protein, 9 aa, BK virus
EVLVMPSTV

SEQ ID NO: 18479 - protein, 9 aa, BK virus
VLVMPSTVA

SEQ ID NO: 18480 - protein, 9 aa, BK virus
LVMPSTVAR

SEQ ID NO: 18481 - protein, 9 aa, BK virus
VMPSTVARD

SEQ ID NO: 18482 - protein, 9 aa, BK virus
MPSTVARDA

SEQ ID NO: 18483 - protein, 9 aa, BK virus
PSTVARDAI

SEQ ID NO: 18484 - protein, 9 aa, BK virus
TSIAAAASP

SEQ ID NO: 18485 - protein, 9 aa, BK virus
SIAAAASPA

SEQ ID NO: 18486 - protein, 9 aa, BK virus
IAAAASPAA

SEQ ID NO: 18487 - protein, 9 aa, BK virus
AAAASPAAI

SEQ ID NO: 18488 - protein, 9 aa, BK virus
AAASPAAIS

SEQ ID NO: 18489 - protein, 9 aa, BK virus
AASPAAISA

SEQ ID NO: 18490 - protein, 9 aa, BK virus
ASPAAISAT

SEQ ID NO: 18491 - protein, 9 aa, BK virus
SPAAISATE

SEQ ID NO: 18492 - protein, 9 aa, BK virus
PAAISATEN

SEQ ID NO: 18493 - protein, 9 aa, BK virus
AAISATENP

SEQ ID NO: 18494 - protein, 9 aa, BK virus
AISATENPV

SEQ ID NO: 18495 - protein, 9 aa, BK virus
ISATENPVA

SEQ ID NO: 18496 - protein, 9 aa, BK virus
SATENPVAA

SEQ ID NO: 18497 - protein, 9 aa, BK virus
ATENPVAAA

SEQ ID NO: 18498 - protein, 9 aa, BK virus
TENPVAAAA

SEQ ID NO: 18499 - protein, 9 aa, BK virus
ENPVAAAAS

SEQ ID NO: 18500 - protein, 9 aa, BK virus
NPVAAAASD

SEQ ID NO: 18501 - protein, 9 aa, BK virus
PVAAAASDT

SEQ ID NO: 18502 - protein, 9 aa, BK virus
VAAAASDTL

SEQ ID NO: 18503 - protein, 9 aa, BK virus
AAAASDTLA

SEQ ID NO: 18504 - protein, 9 aa, BK virus
AAASDTLAT

SEQ ID NO: 18505 - protein, 9 aa, BK virus
AASDTLATR

SEQ ID NO: 18506 - protein, 9 aa, BK virus
ASDTLATRS

SEQ ID NO: 18507 - protein, 9 aa, BK virus
SDTLATRSP

SEQ ID NO: 18508 - protein, 9 aa, BK virus
DTLATRSPK

SEQ ID NO: 18509 - protein, 9 aa, BK virus
TLATRSPKS

SEQ ID NO: 18510 - protein, 9 aa, BK virus
LATRSPKSA

SEQ ID NO: 18511 - protein, 9 aa, BK virus
ATRSPKSAR

SEQ ID NO: 18512 - protein, 9 aa, BK virus
TRSPKSARA

SEQ ID NO: 18513 - protein, 9 aa, BK virus
RSPKSARAA

SEQ ID NO: 18514 - protein, 9 aa, BK virus
SPKSARAAP

SEQ ID NO: 18515 - protein, 9 aa, BK virus
PKSARAAPM

SEQ ID NO: 18516 - protein, 9 aa, BK virus
KSARAAPMN

SEQ ID NO: 18517 - protein, 9 aa, BK virus
SARAAPMNL

SEQ ID NO: 18518 - protein, 9 aa, BK virus
ARAAPMNLE

SEQ ID NO: 18519 - protein, 9 aa, BK virus
RAAPMNLEI

SEQ ID NO: 18520 - protein, 9 aa, BK virus
AAPMNLEIQ

SEQ ID NO: 18521 - protein, 9 aa, BK virus
APMNLEIQK

SEQ ID NO: 18522 - protein, 9 aa, BK virus
PMNLEIQKK

SEQ ID NO: 18523 - protein, 9 aa, BK virus
MNLEIQKKR

SEQ ID NO: 18524 - protein, 9 aa, BK virus
NLEIQKKRD

SEQ ID NO: 18525 - protein, 9 aa, BK virus
LEIQKKRDY

SEQ ID NO: 18526 - protein, 9 aa, BK virus
EIQKKRDYL

SEQ ID NO: 18527 - protein, 9 aa, BK virus
IQKKRDYLP

SEQ ID NO: 18528 - protein, 9 aa, BK virus
QKKRDYLPR

SEQ ID NO: 18529 - protein, 9 aa, BK virus
KKRDYLPRS

SEQ ID NO: 18530 - protein, 9 aa, BK virus
KRDYLPRSL

SEQ ID NO: 18531 - protein, 9 aa, BK virus
RDYLPRSLL

SEQ ID NO: 18532 - protein, 9 aa, BK virus
DYLPRSLLQ

SEQ ID NO: 18533 - protein, 9 aa, BK virus
YLPRSLLQS

SEQ ID NO: 18534 - protein, 9 aa, BK virus
LPRSLLQSL

SEQ ID NO: 18535 - protein, 9 aa, BK virus
PRSLLQSLL

SEQ ID NO: 18536 - protein, 9 aa, BK virus
RSLLQSLLQ

SEQ ID NO: 18537 - protein, 9 aa, BK virus
SLLQSLLQQ

SEQ ID NO: 18538 - protein, 9 aa, BK virus
LLQSLLQQV

SEQ ID NO: 18539 - protein, 9 aa, BK virus
LQSLLQQVK

SEQ ID NO: 18540 - protein, 9 aa, BK virus
QSLLQQVKQ

SEQ ID NO: 18541 - protein, 9 aa, BK virus
SLLQQVKQW

SEQ ID NO: 18542 - protein, 9 aa, BK virus
LLQQVKQWY

SEQ ID NO: 18543 - protein, 9 aa, BK virus
LQQVKQWYF

SEQ ID NO: 18544 - protein, 9 aa, BK virus
QQVKQWYFC

SEQ ID NO: 18545 - protein, 9 aa, BK virus
QVKQWYFCF

SEQ ID NO: 18546 - protein, 9 aa, BK virus
VKQWYFCFS

SEQ ID NO: 18547 - protein, 9 aa, BK virus
KQWYFCFSR

SEQ ID NO: 18548 - protein, 9 aa, BK virus
QWYFCFSRL

SEQ ID NO: 18549 - protein, 9 aa, BK virus
WYFCFSRLH

SEQ ID NO: 18550 - protein, 9 aa, BK virus
YFCFSRLHC

SEQ ID NO: 18551 - protein, 9 aa, BK virus
FCFSRLHCL

SEQ ID NO: 18552 - protein, 9 aa, BK virus
CFSRLHCLH

SEQ ID NO: 18553 - protein, 9 aa, BK virus
FSRLHCLHL

SEQ ID NO: 18554 - protein, 9 aa, BK virus
SRLHCLHLY

SEQ ID NO: 18555 - protein, 9 aa, BK virus
RLHCLHLYK

SEQ ID NO: 18556 - protein, 9 aa, BK virus
LHCLHLYKI

SEQ ID NO: 18557 - protein, 9 aa, BK virus
HCLHLYKIP

SEQ ID NO: 18558 - protein, 9 aa, BK virus
CLHLYKIPA

SEQ ID NO: 18559 - protein, 9 aa, BK virus
LHLYKIPAK

SEQ ID NO: 18560 - protein, 9 aa, BK virus
HLYKIPAKA

SEQ ID NO: 18561 - protein, 9 aa, BK virus
LYKIPAKAL

SEQ ID NO: 18562 - protein, 9 aa, BK virus
YKIPAKALK

SEQ ID NO: 18563 - protein, 9 aa, BK virus
KSSELFFLF

SEQ ID NO: 18564 - protein, 9 aa, BK virus
SSELFFLFQ

SEQ ID NO: 18565 - protein, 9 aa, BK virus
SELFFLFQS

SEQ ID NO: 18566 - protein, 9 aa, BK virus
ELFFLFQSR

SEQ ID NO: 18567 - protein, 9 aa, BK virus
LFFLFQSRF

SEQ ID NO: 18568 - protein, 9 aa, BK virus
FFLFQSRFY

SEQ ID NO: 18569 - protein, 9 aa, BK virus
FLFQSRFYQ

SEQ ID NO: 18570 - protein, 9 aa, BK virus
LFQSRFYQL

SEQ ID NO: 18571 - protein, 9 aa, BK virus
FQSRFYQLS

SEQ ID NO: 18572 - protein, 9 aa, BK virus
QSRFYQLSL

SEQ ID NO: 18573 - protein, 9 aa, BK virus
SRFYQLSLK

SEQ ID NO: 18574 - protein, 9 aa, BK virus
RFYQLSLKL

SEQ ID NO: 18575 - protein, 9 aa, BK virus
FYQLSLKLV

SEQ ID NO: 18576 - protein, 9 aa, BK virus
YQLSLKLVV

SEQ ID NO: 18577 - protein, 9 aa, BK virus
QLSLKLVVT

SEQ ID NO: 18578 - protein, 9 aa, BK virus
LSLKLVVTA

SEQ ID NO: 18579 - protein, 9 aa, BK virus
SLKLVVTAG

SEQ ID NO: 18580 - protein, 9 aa, BK virus
LKLVVTAGA

SEQ ID NO: 18581 - protein, 9 aa, BK virus
KLVVTAGAE

SEQ ID NO: 18582 - protein, 9 aa, BK virus
LVVTAGAEP

SEQ ID NO: 18583 - protein, 9 aa, BK virus
VVTAGAEPW

SEQ ID NO: 18584 - protein, 9 aa, BK virus
VTAGAEPWP

SEQ ID NO: 18585 - protein, 9 aa, BK virus
TAGAEPWPL

SEQ ID NO: 18586 - protein, 9 aa, BK virus
AGAEPWPLS

SEQ ID NO: 18587 - protein, 9 aa, BK virus
GAEPWPLSS

SEQ ID NO: 18588 - protein, 9 aa, BK virus
AEPWPLSSL

SEQ ID NO: 18589 - protein, 9 aa, BK virus
EPWPLSSLT

SEQ ID NO: 18590 - protein, 9 aa, BK virus
PWPLSSLTG

SEQ ID NO: 18591 - protein, 9 aa, BK virus
WPLSSLTGD

SEQ ID NO: 18592 - protein, 9 aa, BK virus
PLSSLTGDK

SEQ ID NO: 18593 - protein, 9 aa, BK virus
LSSLTGDKA

SEQ ID NO: 18594 - protein, 9 aa, BK virus
SSLTGDKAK

SEQ ID NO: 18595 - protein, 9 aa, BK virus
SLTGDKAKI

SEQ ID NO: 18596 - protein, 9 aa, BK virus
LTGDKAKIP

SEQ ID NO: 18597 - protein, 9 aa, BK virus
TGDKAKIPR

SEQ ID NO: 18598 - protein, 9 aa, BK virus
GDKAKIPRL

SEQ ID NO: 18599 - protein, 9 aa, BK virus
DKAKIPRLA

SEQ ID NO: 18600 - protein, 9 aa, BK virus
KAKIPRLAK

SEQ ID NO: 18601 - protein, 9 aa, BK virus
AKIPRLAKH

SEQ ID NO: 18602 - protein, 9 aa, BK virus
KIPRLAKHV

SEQ ID NO: 18603 - protein, 9 aa, BK virus
IPRLAKHVC

SEQ ID NO: 18604 - protein, 9 aa, BK virus
PRLAKHVCH

SEQ ID NO: 18605 - protein, 9 aa, BK virus
RLAKHVCHA

SEQ ID NO: 18606 - protein, 9 aa, BK virus
LAKHVCHAL

SEQ ID NO: 18607 - protein, 9 aa, BK virus
AKHVCHALS

SEQ ID NO: 18608 - protein, 9 aa, BK virus
KHVCHALSF

SEQ ID NO: 18609 - protein, 9 aa, BK virus
HVCHALSFL

SEQ ID NO: 18610 - protein, 9 aa, BK virus
VCHALSFLR

SEQ ID NO: 18611 - protein, 9 aa, BK virus
CHALSFLRS

SEQ ID NO: 18612 - protein, 9 aa, BK virus
HALSFLRSW

SEQ ID NO: 18613 - protein, 9 aa, BK virus
ALSFLRSWF

SEQ ID NO: 18614 - protein, 9 aa, BK virus
LSFLRSWFG

SEQ ID NO: 18615 - protein, 9 aa, BK virus
SFLRSWFGC

SEQ ID NO: 18616 - protein, 9 aa, BK virus
FLRSWFGCI

SEQ ID NO: 18617 - protein, 9 aa, BK virus
LRSWFGCIP

SEQ ID NO: 18618 - protein, 9 aa, BK virus
RSWFGCIPW

SEQ ID NO: 18619 - protein, 9 aa, BK virus
SWFGCIPWV

SEQ ID NO: 18620 - protein, 9 aa, BK virus
WFGCIPWVS

SEQ ID NO: 18621 - protein, 9 aa, BK virus
FGCIPWVSS

SEQ ID NO: 18622 - protein, 9 aa, BK virus
GCIPWVSSS

SEQ ID NO: 18623 - protein, 9 aa, BK virus
CIPWVSSSS

SEQ ID NO: 18624 - protein, 9 aa, BK virus
IPWVSSSSL

SEQ ID NO: 18625 - protein, 9 aa, BK virus
GHGLAAFPC

SEQ ID NO: 18626 - protein, 9 aa, BK virus
HGLAAFPCE

SEQ ID NO: 18627 - protein, 9 aa, BK virus
GLAAFPCES

SEQ ID NO: 18628 - protein, 9 aa, BK virus
LAAFPCESC

SEQ ID NO: 18629 - protein, 9 aa, BK virus
AAFPCESCT

SEQ ID NO: 18630 - protein, 9 aa, BK virus
AFPCESCTF

SEQ ID NO: 18631 - protein, 9 aa, BK virus
FPCESCTFL

SEQ ID NO: 18632 - protein, 9 aa, BK virus
PCESCTFLP

SEQ ID NO: 18633 - protein, 9 aa, BK virus
CESCTFLPE

SEQ ID NO: 18634 - protein, 9 aa, BK virus
ESCTFLPEV

SEQ ID NO: 18635 - protein, 9 aa, BK virus
SCTFLPEVM

SEQ ID NO: 18636 - protein, 9 aa, BK virus
CTFLPEVMV

SEQ ID NO: 18637 - protein, 9 aa, BK virus
TFLPEVMVW

SEQ ID NO: 18638 - protein, 9 aa, BK virus
FLPEVMVWL

SEQ ID NO: 18639 - protein, 9 aa, BK virus
LPEVMVWLH

SEQ ID NO: 18640 - protein, 9 aa, BK virus
PEVMVWLHS

SEQ ID NO: 18641 - protein, 9 aa, BK virus
EVMVWLHSM

SEQ ID NO: 18642 - protein, 9 aa, BK virus
VMVWLHSMG

SEQ ID NO: 18643 - protein, 9 aa, BK virus
MVWLHSMGK

SEQ ID NO: 18644 - protein, 9 aa, BK virus
VWLHSMGKQ

SEQ ID NO: 18645 - protein, 9 aa, BK virus
WLHSMGKQL

SEQ ID NO: 18646 - protein, 9 aa, BK virus
LHSMGKQLL

SEQ ID NO: 18647 - protein, 9 aa, BK virus
HSMGKQLLP

SEQ ID NO: 18648 - protein, 9 aa, BK virus
SMGKQLLPV

SEQ ID NO: 18649 - protein, 9 aa, BK virus
MGKQLLPVA

SEQ ID NO: 18650 - protein, 9 aa, BK virus
GKQLLPVAF

SEQ ID NO: 18651 - protein, 9 aa, BK virus
KQLLPVAFF

SEQ ID NO: 18652 - protein, 9 aa, BK virus
QLLPVAFFF

SEQ ID NO: 18653 - protein, 9 aa, BK virus
LLPVAFFFI

SEQ ID NO: 18654 - protein, 9 aa, BK virus
LPVAFFFII

SEQ ID NO: 18655 - protein, 9 aa, BK virus
PVAFFFIIY

SEQ ID NO: 18656 - protein, 9 aa, BK virus
VAFFFIIYK

SEQ ID NO: 18657 - protein, 9 aa, BK virus
AFFFIIYKR

SEQ ID NO: 18658 - protein, 9 aa, BK virus
FFFIIYKRP

SEQ ID NO: 18659 - protein, 9 aa, BK virus
FFIIYKRPR

SEQ ID NO: 18660 - protein, 9 aa, BK virus
FIIYKRPRP

SEQ ID NO: 18661 - protein, 9 aa, BK virus
IIYKRPRPP

SEQ ID NO: 18662 - protein, 9 aa, BK virus
IYKRPRPPL

SEQ ID NO: 18663 - protein, 9 aa, BK virus
YKRPRPPLP

SEQ ID NO: 18664 - protein, 9 aa, BK virus
KRPRPPLPP

SEQ ID NO: 18665 - protein, 9 aa, BK virus
RPRPPLPPP

SEQ ID NO: 18666 - protein, 9 aa, BK virus
PRPPLPPPF

SEQ ID NO: 18667 - protein, 9 aa, BK virus
RPPLPPPFL

SEQ ID NO: 18668 - protein, 9 aa, BK virus
PPLPPPFLS

SEQ ID NO: 18669 - protein, 9 aa, BK virus
PLPPPFLSS

SEQ ID NO: 18670 - protein, 9 aa, BK virus
LPPPFLSSS

SEQ ID NO: 18671 - protein, 9 aa, BK virus
PPPFLSSSK

SEQ ID NO: 18672 - protein, 9 aa, BK virus
PPFLSSSKG

SEQ ID NO: 18673 - protein, 9 aa, BK virus
PFLSSSKGV

SEQ ID NO: 18674 - protein, 9 aa, BK virus
FLSSSKGVE

SEQ ID NO: 18675 - protein, 9 aa, BK virus
LSSSKGVEA

SEQ ID NO: 18676 - protein, 9 aa, BK virus
SSSKGVEAF

SEQ ID NO: 18677 - protein, 9 aa, BK virus
SSKGVEAFS

SEQ ID NO: 18678 - protein, 9 aa, BK virus
SKGVEAFSE

SEQ ID NO: 18679 - protein, 9 aa, BK virus
KGVEAFSEA

SEQ ID NO: 18680 - protein, 9 aa, BK virus
QNYLGKSLF

SEQ ID NO: 18681 - protein, 9 aa, BK virus
NYLGKSLFF

SEQ ID NO: 18682 - protein, 9 aa, BK virus
YLGKSLFFC

SEQ ID NO: 18683 - protein, 9 aa, BK virus
LGKSLFFCN

SEQ ID NO: 18684 - protein, 9 aa, BK virus
GKSLFFCNF

SEQ ID NO: 18685 - protein, 9 aa, BK virus
KSLFFCNFC

SEQ ID NO: 18686 - protein, 9 aa, BK virus
SLFFCNFCK

SEQ ID NO: 18687 - protein, 10 aa, BK virus
WIKFLTGKNP

SEQ ID NO: 18688 - protein, 10 aa, BK virus
IKFLTGKNPW

SEQ ID NO: 18689 - protein, 10 aa, BK virus
KFLTGKNPWS

SEQ ID NO: 18690 - protein, 10 aa, BK virus
FLTGKNPWSS

SEQ ID NO: 18691 - protein, 10 aa, BK virus
LTGKNPWSSW

SEQ ID NO: 18692 - protein, 10 aa, BK virus
TGKNPWSSWT

SEQ ID NO: 18693 - protein, 10 aa, BK virus
GKNPWSSWTF

SEQ ID NO: 18694 - protein, 10 aa, BK virus
ALKELPGEIF

SEQ ID NO: 18695 - protein, 10 aa, BK virus
LKELPGEIFP

SEQ ID NO: 18696 - protein, 10 aa, BK virus
GSVRNFTLTK

SEQ ID NO: 18697 - protein, 10 aa, BK virus
SVRNFTLTKG

SEQ ID NO: 18698 - protein, 10 aa, BK virus
VRNFTLTKGA

SEQ ID NO: 18699 - protein, 10 aa, BK virus
RNFTLTKGAT

SEQ ID NO: 18700 - protein, 10 aa, BK virus
NFTLTKGATR

SEQ ID NO: 18701 - protein, 10 aa, BK virus
FTLTKGATRI

SEQ ID NO: 18702 - protein, 10 aa, BK virus
TLTKGATRIK

SEQ ID NO: 18703 - protein, 10 aa, BK virus
ILCIKKWSRM

SEQ ID NO: 18704 - protein, 10 aa, BK virus
LISLILEPGV

SEQ ID NO: 18705 - protein, 10 aa, BK virus
ISLILEPGVA

SEQ ID NO: 18706 - protein, 10 aa, BK virus
SLILEPGVAQ

SEQ ID NO: 18707 - protein, 10 aa, BK virus
LILEPGVAQR

SEQ ID NO: 18708 - protein, 10 aa, BK virus
ILEPGVAQRF

SEQ ID NO: 18709 - protein, 10 aa, BK virus
LEPGVAQRFV

SEQ ID NO: 18710 - protein, 10 aa, BK virus
EPGVAQRFVL

SEQ ID NO: 18711 - protein, 10 aa, BK virus
PGVAQRFVLI

SEQ ID NO: 18712 - protein, 10 aa, BK virus
GVAQRFVLIF

SEQ ID NO: 18713 - protein, 10 aa, BK virus
VAQRFVLIFL

SEQ ID NO: 18714 - protein, 10 aa, BK virus
AQRFVLIFLF

SEQ ID NO: 18715 - protein, 10 aa, BK virus
QRFVLIFLFA

SEQ ID NO: 18716 - protein, 10 aa, BK virus
RFVLIFLFAQ

SEQ ID NO: 18717 - protein, 10 aa, BK virus
FVLIFLFAQI

SEQ ID NO: 18718 - protein, 10 aa, BK virus
VLIFLFAQIP

SEQ ID NO: 18719 - protein, 10 aa, BK virus
LIFLFAQIPC

SEQ ID NO: 18720 - protein, 10 aa, BK virus
IFLFAQIPCT

SEQ ID NO: 18721 - protein, 10 aa, BK virus
FLFAQIPCTA

SEQ ID NO: 18722 - protein, 10 aa, BK virus
LFAQIPCTAR

SEQ ID NO: 18723 - protein, 10 aa, BK virus
FAQIPCTARN

SEQ ID NO: 18724 - protein, 10 aa, BK virus
AQIPCTARNG

SEQ ID NO: 18725 - protein, 10 aa, BK virus
QIPCTARNGL

SEQ ID NO: 18726 - protein, 10 aa, BK virus
IPCTARNGLF

SEQ ID NO: 18727 - protein, 10 aa, BK virus
PCTARNGLFV

SEQ ID NO: 18728 - protein, 10 aa, BK virus
CTARNGLFVP

SEQ ID NO: 18729 - protein, 10 aa, BK virus
TARNGLFVPK

SEQ ID NO: 18730 - protein, 10 aa, BK virus
ARNGLFVPKS

SEQ ID NO: 18731 - protein, 10 aa, BK virus
RNGLFVPKSL

SEQ ID NO: 18732 - protein, 10 aa, BK virus
NGLFVPKSLL

SEQ ID NO: 18733 - protein, 10 aa, BK virus
GLFVPKSLLC

SEQ ID NO: 18734 - protein, 10 aa, BK virus
LFVPKSLLCT

SEQ ID NO: 18735 - protein, 10 aa, BK virus
FVPKSLLCTA

SEQ ID NO: 18736 - protein, 10 aa, BK virus
VPKSLLCTAL

SEQ ID NO: 18737 - protein, 10 aa, BK virus
PKSLLCTALA

SEQ ID NO: 18738 - protein, 10 aa, BK virus
KSLLCTALAC

SEQ ID NO: 18739 - protein, 10 aa, BK virus
SLLCTALACY

SEQ ID NO: 18740 - protein, 10 aa, BK virus
LLCTALACYV

SEQ ID NO: 18741 - protein, 10 aa, BK virus
LCTALACYVS

SEQ ID NO: 18742 - protein, 10 aa, BK virus
CTALACYVSL

SEQ ID NO: 18743 - protein, 10 aa, BK virus
TALACYVSLD

SEQ ID NO: 18744 - protein, 10 aa, BK virus
IATALTASHS

SEQ ID NO: 18745 - protein, 10 aa, BK virus
ATALTASHSG

SEQ ID NO: 18746 - protein, 10 aa, BK virus
TALTASHSGL

SEQ ID NO: 18747 - protein, 10 aa, BK virus
ALTASHSGLA

SEQ ID NO: 18748 - protein, 10 aa, BK virus
LKKLCNGGSK

SEQ ID NO: 18749 - protein, 10 aa, BK virus
SFKVTNLYLD

SEQ ID NO: 18750 - protein, 10 aa, BK virus
FKVTNLYLDK

SEQ ID NO: 18751 - protein, 10 aa, BK virus
VIIFFIGANL

SEQ ID NO: 18752 - protein, 10 aa, BK virus
IIFFIGANLW

SEQ ID NO: 18753 - protein, 10 aa, BK virus
IFFIGANLWN

SEQ ID NO: 18754 - protein, 10 aa, BK virus
FFIGANLWNR

SEQ ID NO: 18755 - protein, 10 aa, BK virus
FIGANLWNRR

SEQ ID NO: 18756 - protein, 10 aa, BK virus
IGANLWNRRV

SEQ ID NO: 18757 - protein, 10 aa, BK virus
GANLWNRRVG

SEQ ID NO: 18758 - protein, 10 aa, BK virus
ANLWNRRVGV

SEQ ID NO: 18759 - protein, 10 aa, BK virus
NLWNRRVGVL

SEQ ID NO: 18760 - protein, 10 aa, BK virus
LWNRRVGVLV

SEQ ID NO: 18761 - protein, 10 aa, BK virus
WNRRVGVLVE

SEQ ID NO: 18762 - protein, 10 aa, BK virus
NRRVGVLVEF

SEQ ID NO: 18763 - protein, 10 aa, BK virus
RRVGVLVEFL

SEQ ID NO: 18764 - protein, 10 aa, BK virus
RSNSRFSTLN

SEQ ID NO: 18765 - protein, 10 aa, BK virus
SNSRFSTLNT

SEQ ID NO: 18766 - protein, 10 aa, BK virus
NSRFSTLNTT

SEQ ID NO: 18767 - protein, 10 aa, BK virus
SRFSTLNTTQ

SEQ ID NO: 18768 - protein, 10 aa, BK virus
RFSTLNTTQK

SEQ ID NO: 18769 - protein, 10 aa, BK virus
FSTLNTTQKK

SEQ ID NO: 18770 - protein, 10 aa, BK virus
STLNTTQKKK

SEQ ID NO: 18771 - protein, 10 aa, BK virus
TLNTTQKKKK

SEQ ID NO: 18772 - protein, 10 aa, BK virus
LNTTQKKKKG

SEQ ID NO: 18773 - protein, 10 aa, BK virus
NTTQKKKKGR

SEQ ID NO: 18774 - protein, 10 aa, BK virus
TTQKKKKGRR

SEQ ID NO: 18775 - protein, 10 aa, BK virus
TQKKKKGRRP

SEQ ID NO: 18776 - protein, 10 aa, BK virus
NPCLLCCVYY

SEQ ID NO: 18777 - protein, 10 aa, BK virus
KTYGKIFCNF

SEQ ID NO: 18778 - protein, 10 aa, BK virus
TYGKIFCNFY

SEQ ID NO: 18779 - protein, 10 aa, BK virus
RSIPYYRRKH

SEQ ID NO: 18780 - protein, 10 aa, BK virus
SIPYYRRKHS

SEQ ID NO: 18781 - protein, 10 aa, BK virus
IPYYRRKHSR

SEQ ID NO: 18782 - protein, 10 aa, BK virus
PYYRRKHSRG

SEQ ID NO: 18783 - protein, 10 aa, BK virus
YYRRKHSRGL

SEQ ID NO: 18784 - protein, 10 aa, BK virus
YRRKHSRGLK

SEQ ID NO: 18785 - protein, 10 aa, BK virus
RRKHSRGLKG

SEQ ID NO: 18786 - protein, 10 aa, BK virus
RKHSRGLKGA

SEQ ID NO: 18787 - protein, 10 aa, BK virus
RNKAGVLEIN

SEQ ID NO: 18788 - protein, 10 aa, BK virus
NKAGVLEINY

SEQ ID NO: 18789 - protein, 10 aa, BK virus
GCVFIIRYVF

SEQ ID NO: 18790 - protein, 10 aa, BK virus
CVFIIRYVFR

SEQ ID NO: 18791 - protein, 10 aa, BK virus
VFIIRYVFRI

SEQ ID NO: 18792 - protein, 10 aa, BK virus
FIIRYVFRIS

SEQ ID NO: 18793 - protein, 10 aa, BK virus
IIRYVFRISI

SEQ ID NO: 18794 - protein, 10 aa, BK virus
IRYVFRISIQ

SEQ ID NO: 18795 - protein, 10 aa, BK virus
RYVFRISIQC

SEQ ID NO: 18796 - protein, 10 aa, BK virus
YVFRISIQCR

SEQ ID NO: 18797 - protein, 10 aa, BK virus
VFRISIQCRG

SEQ ID NO: 18798 - protein, 10 aa, BK virus
FRISIQCRGV

SEQ ID NO: 18799 - protein, 10 aa, BK virus
KVSEKRPALS

SEQ ID NO: 18800 - protein, 10 aa, BK virus
VSEKRPALSL

SEQ ID NO: 18801 - protein, 10 aa, BK virus
KALCKCYYFC

SEQ ID NO: 18802 - protein, 10 aa, BK virus
ALCKCYYFCR

SEQ ID NO: 18803 - protein, 10 aa, BK virus
LCKCYYFCRK

SEQ ID NO: 18804 - protein, 10 aa, BK virus
KSKKYLSASS

SEQ ID NO: 18805 - protein, 10 aa, BK virus
SKKYLSASSR

SEQ ID NO: 18806 - protein, 10 aa, BK virus
KKYLSASSRY

SEQ ID NO: 18807 - protein, 10 aa, BK virus
KYLSASSRYS

SEQ ID NO: 18808 - protein, 10 aa, BK virus
YLSASSRYSF

SEQ ID NO: 18809 - protein, 10 aa, BK virus
LSASSRYSFS

SEQ ID NO: 18810 - protein, 10 aa, BK virus
KKSRYPSYDQ

SEQ ID NO: 18811 - protein, 10 aa, BK virus
KSRYPSYDQG

SEQ ID NO: 18812 - protein, 10 aa, BK virus
SRYPSYDQGR

SEQ ID NO: 18813 - protein, 10 aa, BK virus
RYPSYDQGRN

SEQ ID NO: 18814 - protein, 10 aa, BK virus
YPSYDQGRNA

SEQ ID NO: 18815 - protein, 10 aa, BK virus
PSYDQGRNAN

SEQ ID NO: 18816 - protein, 10 aa, BK virus
SYDQGRNANR

SEQ ID NO: 18817 - protein, 10 aa, BK virus
YDQGRNANRK

SEQ ID NO: 18818 - protein, 10 aa, BK virus
DQGRNANRKI

SEQ ID NO: 18819 - protein, 10 aa, BK virus
QGRNANRKIQ

SEQ ID NO: 18820 - protein, 10 aa, BK virus
GRNANRKIQS

SEQ ID NO: 18821 - protein, 10 aa, BK virus
RNANRKIQSY

SEQ ID NO: 18822 - protein, 10 aa, BK virus
NANRKIQSYI

SEQ ID NO: 18823 - protein, 10 aa, BK virus
ANRKIQSYIR

SEQ ID NO: 18824 - protein, 10 aa, BK virus
NGFNIWSSWK

SEQ ID NO: 18825 - protein, 10 aa, BK virus
GFNIWSSWKC

SEQ ID NO: 18826 - protein, 10 aa, BK virus
FNIWSSWKCC

SEQ ID NO: 18827 - protein, 10 aa, BK virus
NIWSSWKCCT

SEQ ID NO: 18828 - protein, 10 aa, BK virus
IWSSWKCCTR

SEQ ID NO: 18829 - protein, 10 aa, BK virus
WSSWKCCTRT

SEQ ID NO: 18830 - protein, 10 aa, BK virus
SSWKCCTRTI

SEQ ID NO: 18831 - protein, 10 aa, BK virus
SWKCCTRTIY

SEQ ID NO: 18832 - protein, 10 aa, BK virus
WKCCTRTIYG

SEQ ID NO: 18833 - protein, 10 aa, BK virus
KCCTRTIYGR

SEQ ID NO: 18834 - protein, 10 aa, BK virus
CCTRTIYGRC

SEQ ID NO: 18835 - protein, 10 aa, BK virus
CTRTIYGRCC

SEQ ID NO: 18836 - protein, 10 aa, BK virus
TRTIYGRCCL

SEQ ID NO: 18837 - protein, 10 aa, BK virus
RTIYGRCCLA

SEQ ID NO: 18838 - protein, 10 aa, BK virus
TIYGRCCLAA

SEQ ID NO: 18839 - protein, 10 aa, BK virus
IYGRCCLAAL

SEQ ID NO: 18840 - protein, 10 aa, BK virus
YGRCCLAALF

SEQ ID NO: 18841 - protein, 10 aa, BK virus
GRCCLAALFA

SEQ ID NO: 18842 - protein, 10 aa, BK virus
RCCLAALFAT

SEQ ID NO: 18843 - protein, 10 aa, BK virus
FFALYCFQCT

SEQ ID NO: 18844 - protein, 10 aa, BK virus
WKNNTSCRVI

SEQ ID NO: 18845 - protein, 10 aa, BK virus
KNNTSCRVIR

SEQ ID NO: 18846 - protein, 10 aa, BK virus
NNTSCRVIRF

SEQ ID NO: 18847 - protein, 10 aa, BK virus
NTSCRVIRFV

SEQ ID NO: 18848 - protein, 10 aa, BK virus
TSCRVIRFVW

SEQ ID NO: 18849 - protein, 10 aa, BK virus
SCRVIRFVWW

SEQ ID NO: 18850 - protein, 10 aa, BK virus
SLKCKPTHGK

SEQ ID NO: 18851 - protein, 10 aa, BK virus
LKCKPTHGKA

SEQ ID NO: 18852 - protein, 10 aa, BK virus
KCKPTHGKAN

SEQ ID NO: 18853 - protein, 10 aa, BK virus
CKPTHGKANL

SEQ ID NO: 18854 - protein, 10 aa, BK virus
ARCSYRSVHG

SEQ ID NO: 18855 - protein, 10 aa, BK virus
RCSYRSVHGC

SEQ ID NO: 18856 - protein, 10 aa, BK virus
CSYRSVHGCF

SEQ ID NO: 18857 - protein, 10 aa, BK virus
IKGFAFRTWN

SEQ ID NO: 18858 - protein, 10 aa, BK virus
KGFAFRTWNK

SEQ ID NO: 18859 - protein, 10 aa, BK virus
GFAFRTWNKQ

SEQ ID NO: 18860 - protein, 10 aa, BK virus
FAFRTWNKQF

SEQ ID NO: 18861 - protein, 10 aa, BK virus
AFRTWNKQFR

SEQ ID NO: 18862 - protein, 10 aa, BK virus
FRTWNKQFRQ

SEQ ID NO: 18863 - protein, 10 aa, BK virus
RTWNKQFRQF

SEQ ID NO: 18864 - protein, 10 aa, BK virus
TWNKQFRQFE

SEQ ID NO: 18865 - protein, 10 aa, BK virus
WNKQFRQFER

SEQ ID NO: 18866 - protein, 10 aa, BK virus
NKQFRQFERL

SEQ ID NO: 18867 - protein, 10 aa, BK virus
KQFRQFERLF

SEQ ID NO: 18868 - protein, 10 aa, BK virus
QFRQFERLFR

SEQ ID NO: 18869 - protein, 10 aa, BK virus
FRQFERLFRW

SEQ ID NO: 18870 - protein, 10 aa, BK virus
RQFERLFRWK

SEQ ID NO: 18871 - protein, 10 aa, BK virus
QFERLFRWKC

SEQ ID NO: 18872 - protein, 10 aa, BK virus
GKFRKETFKQ

SEQ ID NO: 18873 - protein, 10 aa, BK virus
KFRKETFKQK

SEQ ID NO: 18874 - protein, 10 aa, BK virus
FRKETFKQKN

SEQ ID NO: 18875 - protein, 10 aa, BK virus
RKETFKQKNP

SEQ ID NO: 18876 - protein, 10 aa, BK virus
KETFKQKNPN

SEQ ID NO: 18877 - protein, 10 aa, BK virus
ETFKQKNPNI

SEQ ID NO: 18878 - protein, 10 aa, BK virus
TFKQKNPNIS

SEQ ID NO: 18879 - protein, 10 aa, BK virus
FKQKNPNIST

SEQ ID NO: 18880 - protein, 10 aa, BK virus
KQKNPNISTR

SEQ ID NO: 18881 - protein, 10 aa, BK virus
QKNPNISTRL

SEQ ID NO: 18882 - protein, 10 aa, BK virus
KNPNISTRLG

SEQ ID NO: 18883 - protein, 10 aa, BK virus
NPNISTRLGY

SEQ ID NO: 18884 - protein, 10 aa, BK virus
PNISTRLGYN

SEQ ID NO: 18885 - protein, 10 aa, BK virus
NISTRLGYNE

SEQ ID NO: 18886 - protein, 10 aa, BK virus
AQNIFKKILT

SEQ ID NO: 18887 - protein, 10 aa, BK virus
QNIFKKILTK

SEQ ID NO: 18888 - protein, 10 aa, BK virus
NIFKKILTKL

SEQ ID NO: 18889 - protein, 10 aa, BK virus
IFKKILTKLR

SEQ ID NO: 18890 - protein, 10 aa, BK virus
FKKILTKLRV

SEQ ID NO: 18891 - protein, 10 aa, BK virus
KKILTKLRVL

SEQ ID NO: 18892 - protein, 10 aa, BK virus
KILTKLRVLT

SEQ ID NO: 18893 - protein, 10 aa, BK virus
KKNFTKWNDL

SEQ ID NO: 18894 - protein, 10 aa, BK virus
KNFTKWNDLV

SEQ ID NO: 18895 - protein, 10 aa, BK virus
NFTKWNDLVA

SEQ ID NO: 18896 - protein, 10 aa, BK virus
FTKWNDLVAT

SEQ ID NO: 18897 - protein, 10 aa, BK virus
TKWNDLVATA

SEQ ID NO: 18898 - protein, 10 aa, BK virus
KWNDLVATAN

SEQ ID NO: 18899 - protein, 10 aa, BK virus
WNDLVATANL

SEQ ID NO: 18900 - protein, 10 aa, BK virus
NDLVATANLV

SEQ ID NO: 18901 - protein, 10 aa, BK virus
DKYVYFFKDE

SEQ ID NO: 18902 - protein, 10 aa, BK virus
KYVYFFKDEI

SEQ ID NO: 18903 - protein, 10 aa, BK virus
IPITMLFPSL

SEQ ID NO: 18904 - protein, 10 aa, BK virus
PITMLFPSLR

SEQ ID NO: 18905 - protein, 10 aa, BK virus
ITMLFPSLRY

SEQ ID NO: 18906 - protein, 10 aa, BK virus
TMLFPSLRYF

SEQ ID NO: 18907 - protein, 10 aa, BK virus
MLFPSLRYFS

SEQ ID NO: 18908 - protein, 10 aa, BK virus
LFPSLRYFSP

SEQ ID NO: 18909 - protein, 10 aa, BK virus
FPSLRYFSPC

SEQ ID NO: 18910 - protein, 10 aa, BK virus
KWLIQKQHLL

SEQ ID NO: 18911 - protein, 10 aa, BK virus
WLIQKQHLLN

SEQ ID NO: 18912 - protein, 10 aa, BK virus
LIQKQHLLNV

SEQ ID NO: 18913 - protein, 10 aa, BK virus
IQKQHLLNVY

SEQ ID NO: 18914 - protein, 10 aa, BK virus
QKQHLLNVYV

SEQ ID NO: 18915 - protein, 10 aa, BK virus
KQHLLNVYVQ

SEQ ID NO: 18916 - protein, 10 aa, BK virus
KHLFKAFWFA

SEQ ID NO: 18917 - protein, 10 aa, BK virus
HLFKAFWFAI

SEQ ID NO: 18918 - protein, 10 aa, BK virus
LFKAFWFAIV

SEQ ID NO: 18919 - protein, 10 aa, BK virus
FKAFWFAIVP

SEQ ID NO: 18920 - protein, 10 aa, BK virus
KAFWFAIVPV

SEQ ID NO: 18921 - protein, 10 aa, BK virus
AFWFAIVPVC

SEQ ID NO: 18922 - protein, 10 aa, BK virus
FWFAIVPVCQ

SEQ ID NO: 18923 - protein, 10 aa, BK virus
WFAIVPVCQY

SEQ ID NO: 18924 - protein, 10 aa, BK virus
FAIVPVCQYI

SEQ ID NO: 18925 - protein, 10 aa, BK virus
AIVPVCQYIL

SEQ ID NO: 18926 - protein, 10 aa, BK virus
IVPVCQYILS

SEQ ID NO: 18927 - protein, 10 aa, BK virus
VPVCQYILSY

SEQ ID NO: 18928 - protein, 10 aa, BK virus
PVCQYILSYL

SEQ ID NO: 18929 - protein, 10 aa, BK virus
VCQYILSYLG

SEQ ID NO: 18930 - protein, 10 aa, BK virus
CQYILSYLGP

SEQ ID NO: 18931 - protein, 10 aa, BK virus
QYILSYLGPL

SEQ ID NO: 18932 - protein, 10 aa, BK virus
YILSYLGPLE

SEQ ID NO: 18933 - protein, 10 aa, BK virus
ILSYLGPLEV

SEQ ID NO: 18934 - protein, 10 aa, BK virus
LSYLGPLEVF

SEQ ID NO: 18935 - protein, 10 aa, BK virus
SYLGPLEVFL

SEQ ID NO: 18936 - protein, 10 aa, BK virus
YLGPLEVFLC

SEQ ID NO: 18937 - protein, 10 aa, BK virus
LGPLEVFLCH

SEQ ID NO: 18938 - protein, 10 aa, BK virus
GPLEVFLCHQ

SEQ ID NO: 18939 - protein, 10 aa, BK virus
PLEVFLCHQT

SEQ ID NO: 18940 - protein, 10 aa, BK virus
LEVFLCHQTP

SEQ ID NO: 18941 - protein, 10 aa, BK virus
PLLPGIPYHT

SEQ ID NO: 18942 - protein, 10 aa, BK virus
AAHPLSGFSC

SEQ ID NO: 18943 - protein, 10 aa, BK virus
AHPLSGFSCL

SEQ ID NO: 18944 - protein, 10 aa, BK virus
GHLAKRKLGK

SEQ ID NO: 18945 - protein, 10 aa, BK virus
HLAKRKLGKD

SEQ ID NO: 18946 - protein, 10 aa, BK virus
LAKRKLGKDS

SEQ ID NO: 18947 - protein, 10 aa, BK virus
AKRKLGKDSL

SEQ ID NO: 18948 - protein, 10 aa, BK virus
KRKLGKDSLQ

SEQ ID NO: 18949 - protein, 10 aa, BK virus
RKLGKDSLQI

SEQ ID NO: 18950 - protein, 10 aa, BK virus
KLGKDSLQIF

SEQ ID NO: 18951 - protein, 10 aa, BK virus
LGKDSLQIFF

SEQ ID NO: 18952 - protein, 10 aa, BK virus
GKDSLQIFFS

SEQ ID NO: 18953 - protein, 10 aa, BK virus
KDSLQIFFSG

SEQ ID NO: 18954 - protein, 10 aa, BK virus
DSLQIFFSGG

SEQ ID NO: 18955 - protein, 10 aa, BK virus
SLQIFFSGGS

SEQ ID NO: 18956 - protein, 10 aa, BK virus
NILQGLSTVV

SEQ ID NO: 18957 - protein, 10 aa, BK virus
ILQGLSTVVF

SEQ ID NO: 18958 - protein, 10 aa, BK virus
LQGLSTVVFQ

SEQ ID NO: 18959 - protein, 10 aa, BK virus
QGLSTVVFQS

SEQ ID NO: 18960 - protein, 10 aa, BK virus
GLSTVVFQSC

SEQ ID NO: 18961 - protein, 10 aa, BK virus
TGHKYQQLKH

SEQ ID NO: 18962 - protein, 10 aa, BK virus
GHKYQQLKHT

SEQ ID NO: 18963 - protein, 10 aa, BK virus
HKYQQLKHTG

SEQ ID NO: 18964 - protein, 10 aa, BK virus
KYQQLKHTGY

SEQ ID NO: 18965 - protein, 10 aa, BK virus
YQQLKHTGYQ

SEQ ID NO: 18966 - protein, 10 aa, BK virus
QQLKHTGYQL

SEQ ID NO: 18967 - protein, 10 aa, BK virus
QLKHTGYQLY

SEQ ID NO: 18968 - protein, 10 aa, BK virus
LKHTGYQLYK

SEQ ID NO: 18969 - protein, 10 aa, BK virus
KHTGYQLYKE

SEQ ID NO: 18970 - protein, 10 aa, BK virus
HTGYQLYKEA

SEQ ID NO: 18971 - protein, 10 aa, BK virus
TGYQLYKEAP

SEQ ID NO: 18972 - protein, 10 aa, BK virus
GYQLYKEAPH

SEQ ID NO: 18973 - protein, 10 aa, BK virus
YQLYKEAPHP

SEQ ID NO: 18974 - protein, 10 aa, BK virus
QLYKEAPHPV

SEQ ID NO: 18975 - protein, 10 aa, BK virus
LYKEAPHPVH

SEQ ID NO: 18976 - protein, 10 aa, BK virus
YKEAPHPVHL

SEQ ID NO: 18977 - protein, 10 aa, BK virus
KEAPHPVHLA

SEQ ID NO: 18978 - protein, 10 aa, BK virus
EAPHPVHLAT

SEQ ID NO: 18979 - protein, 10 aa, BK virus
APHPVHLATL

SEQ ID NO: 18980 - protein, 10 aa, BK virus
PHPVHLATLW

SEQ ID NO: 18981 - protein, 10 aa, BK virus
LCWSHEVLGE

SEQ ID NO: 18982 - protein, 10 aa, BK virus
CWSHEVLGEH

SEQ ID NO: 18983 - protein, 10 aa, BK virus
WSHEVLGEHF

SEQ ID NO: 18984 - protein, 10 aa, BK virus
SHEVLGEHFP

SEQ ID NO: 18985 - protein, 10 aa, BK virus
HEVLGEHFPL

SEQ ID NO: 18986 - protein, 10 aa, BK virus
EVLGEHFPLL

SEQ ID NO: 18987 - protein, 10 aa, BK virus
HFHFYWDQVP

SEQ ID NO: 18988 - protein, 10 aa, BK virus
FHFYWDQVPS

SEQ ID NO: 18989 - protein, 10 aa, BK virus
HFYWDQVPST

SEQ ID NO: 18990 - protein, 10 aa, BK virus
FYWDQVPSTQ

SEQ ID NO: 18991 - protein, 10 aa, BK virus
YWDQVPSTQL

SEQ ID NO: 18992 - protein, 10 aa, BK virus
WDQVPSTQLD

SEQ ID NO: 18993 - protein, 10 aa, BK virus
DQVPSTQLDK

SEQ ID NO: 18994 - protein, 10 aa, BK virus
QVPSTQLDKH

SEQ ID NO: 18995 - protein, 10 aa, BK virus
VPSTQLDKHC

SEQ ID NO: 18996 - protein, 10 aa, BK virus
PSTQLDKHCF

SEQ ID NO: 18997 - protein, 10 aa, BK virus
STQLDKHCFC

SEQ ID NO: 18998 - protein, 10 aa, BK virus
TQLDKHCFCP

SEQ ID NO: 18999 - protein, 10 aa, BK virus
QLDKHCFCPN

SEQ ID NO: 19000 - protein, 10 aa, BK virus
LDKHCFCPNR

SEQ ID NO: 19001 - protein, 10 aa, BK virus
DKHCFCPNRP

SEQ ID NO: 19002 - protein, 10 aa, BK virus
KHCFCPNRPY

SEQ ID NO: 19003 - protein, 10 aa, BK virus
HCFCPNRPYG

SEQ ID NO: 19004 - protein, 10 aa, BK virus
CFCPNRPYGQ

SEQ ID NO: 19005 - protein, 10 aa, BK virus
FCPNRPYGQY

SEQ ID NO: 19006 - protein, 10 aa, BK virus
CPNRPYGQYS

SEQ ID NO: 19007 - protein, 10 aa, BK virus
PNRPYGQYSL

SEQ ID NO: 19008 - protein, 10 aa, BK virus
NRPYGQYSLP

SEQ ID NO: 19009 - protein, 10 aa, BK virus
RPYGQYSLPG

SEQ ID NO: 19010 - protein, 10 aa, BK virus
PYGQYSLPGT

SEQ ID NO: 19011 - protein, 10 aa, BK virus
YGQYSLPGTG

SEQ ID NO: 19012 - protein, 10 aa, BK virus
GQYSLPGTGL

SEQ ID NO: 19013 - protein, 10 aa, BK virus
QYSLPGTGLL

SEQ ID NO: 19014 - protein, 10 aa, BK virus
YSLPGTGLLG

SEQ ID NO: 19015 - protein, 10 aa, BK virus
SLPGTGLLGF

SEQ ID NO: 19016 - protein, 10 aa, BK virus
YHQGTLTCNS

SEQ ID NO: 19017 - protein, 10 aa, BK virus
HQGTLTCNSL

SEQ ID NO: 19018 - protein, 10 aa, BK virus
QGTLTCNSLA

SEQ ID NO: 19019 - protein, 10 aa, BK virus
GTLTCNSLAL

SEQ ID NO: 19020 - protein, 10 aa, BK virus
TLTCNSLALP

SEQ ID NO: 19021 - protein, 10 aa, BK virus
LTCNSLALPA

SEQ ID NO: 19022 - protein, 10 aa, BK virus
TCNSLALPAF

SEQ ID NO: 19023 - protein, 10 aa, BK virus
CNSLALPAFP

SEQ ID NO: 19024 - protein, 10 aa, BK virus
NSLALPAFPR

SEQ ID NO: 19025 - protein, 10 aa, BK virus
SLALPAFPRV

SEQ ID NO: 19026 - protein, 10 aa, BK virus
LALPAFPRVL

SEQ ID NO: 19027 - protein, 10 aa, BK virus
ALPAFPRVLH

SEQ ID NO: 19028 - protein, 10 aa, BK virus
LPAFPRVLHL

SEQ ID NO: 19029 - protein, 10 aa, BK virus
PAFPRVLHLQ

SEQ ID NO: 19030 - protein, 10 aa, BK virus
AFPRVLHLQQ

SEQ ID NO: 19031 - protein, 10 aa, BK virus
FPRVLHLQQR

SEQ ID NO: 19032 - protein, 10 aa, BK virus
PRVLHLQQRS

SEQ ID NO: 19033 - protein, 10 aa, BK virus
RVLHLQQRSG

SEQ ID NO: 19034 - protein, 10 aa, BK virus
VLHLQQRSGN

SEQ ID NO: 19035 - protein, 10 aa, BK virus
LHLQQRSGNY

SEQ ID NO: 19036 - protein, 10 aa, BK virus
HLQQRSGNYC

SEQ ID NO: 19037 - protein, 10 aa, BK virus
LQQRSGNYCL

SEQ ID NO: 19038 - protein, 10 aa, BK virus
QQRSGNYCLE

SEQ ID NO: 19039 - protein, 10 aa, BK virus
VFLHHAHALF

SEQ ID NO: 19040 - protein, 10 aa, BK virus
FLHHAHALFV

SEQ ID NO: 19041 - protein, 10 aa, BK virus
LHHAHALFVT

SEQ ID NO: 19042 - protein, 10 aa, BK virus
HHAHALFVTL

SEQ ID NO: 19043 - protein, 10 aa, BK virus
HAHALFVTLH

SEQ ID NO: 19044 - protein, 10 aa, BK virus
AHALFVTLHE

SEQ ID NO: 19045 - protein, 10 aa, BK virus
HALFVTLHEG

SEQ ID NO: 19046 - protein, 10 aa, BK virus
PLFVQLQPPT

SEQ ID NO: 19047 - protein, 10 aa, BK virus
LFVQLQPPTS

SEQ ID NO: 19048 - protein, 10 aa, BK virus
FVQLQPPTSV

SEQ ID NO: 19049 - protein, 10 aa, BK virus
VQLQPPTSVD

SEQ ID NO: 19050 - protein, 10 aa, BK virus
QLQPPTSVDF

SEQ ID NO: 19051 - protein, 10 aa, BK virus
LQPPTSVDFH

SEQ ID NO: 19052 - protein, 10 aa, BK virus
QPPTSVDFHR

SEQ ID NO: 19053 - protein, 10 aa, BK virus
PPTSVDFHRL

SEQ ID NO: 19054 - protein, 10 aa, BK virus
PTSVDFHRLG

SEQ ID NO: 19055 - protein, 10 aa, BK virus
TSVDFHRLGP

SEQ ID NO: 19056 - protein, 10 aa, BK virus
SVDFHRLGPH

SEQ ID NO: 19057 - protein, 10 aa, BK virus
VDFHRLGPHL

SEQ ID NO: 19058 - protein, 10 aa, BK virus
DFHRLGPHLN

SEQ ID NO: 19059 - protein, 10 aa, BK virus
FHRLGPHLNW

SEQ ID NO: 19060 - protein, 10 aa, BK virus
HRLGPHLNWG

SEQ ID NO: 19061 - protein, 10 aa, BK virus
RLGPHLNWGG

SEQ ID NO: 19062 - protein, 10 aa, BK virus
LGPHLNWGGE

SEQ ID NO: 19063 - protein, 10 aa, BK virus
GPHLNWGGEF

SEQ ID NO: 19064 - protein, 10 aa, BK virus
PHLNWGGEFL

SEQ ID NO: 19065 - protein, 10 aa, BK virus
HLNWGGEFLL

SEQ ID NO: 19066 - protein, 10 aa, BK virus
LNWGGEFLLC

SEQ ID NO: 19067 - protein, 10 aa, BK virus
NWGGEFLLCC

SEQ ID NO: 19068 - protein, 10 aa, BK virus
WGGEFLLCCN

SEQ ID NO: 19069 - protein, 10 aa, BK virus
GGEFLLCCNR

SEQ ID NO: 19070 - protein, 10 aa, BK virus
GEFLLCCNRE

SEQ ID NO: 19071 - protein, 10 aa, BK virus
EFLLCCNREA

SEQ ID NO: 19072 - protein, 10 aa, BK virus
FLLCCNREAF

SEQ ID NO: 19073 - protein, 10 aa, BK virus
LLCCNREAFF

SEQ ID NO: 19074 - protein, 10 aa, BK virus
LCCNREAFFS

SEQ ID NO: 19075 - protein, 10 aa, BK virus
CCNREAFFSL

SEQ ID NO: 19076 - protein, 10 aa, BK virus
CNREAFFSLG

SEQ ID NO: 19077 - protein, 10 aa, BK virus
NREAFFSLGY

SEQ ID NO: 19078 - protein, 10 aa, BK virus
REAFFSLGYH

SEQ ID NO: 19079 - protein, 10 aa, BK virus
EAFFSLGYHC

SEQ ID NO: 19080 - protein, 10 aa, BK virus
GFHLDPPFLG

SEQ ID NO: 19081 - protein, 10 aa, BK virus
FHLDPPFLGL

SEQ ID NO: 19082 - protein, 10 aa, BK virus
HLDPPFLGLG

SEQ ID NO: 19083 - protein, 10 aa, BK virus
LDPPFLGLGS

SEQ ID NO: 19084 - protein, 10 aa, BK virus
DPPFLGLGSI

SEQ ID NO: 19085 - protein, 10 aa, BK virus
PPFLGLGSIL

SEQ ID NO: 19086 - protein, 10 aa, BK virus
PFLGLGSILP

SEQ ID NO: 19087 - protein, 10 aa, BK virus
FLGLGSILPL

SEQ ID NO: 19088 - protein, 10 aa, BK virus
LLELLLLLLL

SEQ ID NO: 19089 - protein, 10 aa, BK virus
LELLLLLLLV

SEQ ID NO: 19090 - protein, 10 aa, BK virus
ELLLLLLLVV

SEQ ID NO: 19091 - protein, 10 aa, BK virus
LLLLLLLVVL

SEQ ID NO: 19092 - protein, 10 aa, BK virus
LLLLLLVVLA

SEQ ID NO: 19093 - protein, 10 aa, BK virus
LLLLLVVLAL

SEQ ID NO: 19094 - protein, 10 aa, BK virus
LLLLVVLALA

SEQ ID NO: 19095 - protein, 10 aa, BK virus
LLLVVLALAR

SEQ ID NO: 19096 - protein, 10 aa, BK virus
LLVVLALARV

SEQ ID NO: 19097 - protein, 10 aa, BK virus
LVVLALARVP

SEQ ID NO: 19098 - protein, 10 aa, BK virus
VVLALARVPL

SEQ ID NO: 19099 - protein, 10 aa, BK virus
VLALARVPLA

SEQ ID NO: 19100 - protein, 10 aa, BK virus
LALARVPLAF

SEQ ID NO: 19101 - protein, 10 aa, BK virus
ALARVPLAFW

SEQ ID NO: 19102 - protein, 10 aa, BK virus
LARVPLAFWE

SEQ ID NO: 19103 - protein, 10 aa, BK virus
ARVPLAFWEL

SEQ ID NO: 19104 - protein, 10 aa, BK virus
RVPLAFWELP

SEQ ID NO: 19105 - protein, 10 aa, BK virus
VPLAFWELPL

SEQ ID NO: 19106 - protein, 10 aa, BK virus
PLAFWELPLD

SEQ ID NO: 19107 - protein, 10 aa, BK virus
LAFWELPLDT

SEQ ID NO: 19108 - protein, 10 aa, BK virus
AFWELPLDTL

SEQ ID NO: 19109 - protein, 10 aa, BK virus
FWELPLDTLL

SEQ ID NO: 19110 - protein, 10 aa, BK virus
WELPLDTLLF

SEQ ID NO: 19111 - protein, 10 aa, BK virus
ELPLDTLLFF

SEQ ID NO: 19112 - protein, 10 aa, BK virus
LPLDTLLFFW

SEQ ID NO: 19113 - protein, 10 aa, BK virus
PLDTLLFFWL

SEQ ID NO: 19114 - protein, 10 aa, BK virus
LDTLLFFWLG

SEQ ID NO: 19115 - protein, 10 aa, BK virus
DTLLFFWLGP

SEQ ID NO: 19116 - protein, 10 aa, BK virus
TLLFFWLGPS

SEQ ID NO: 19117 - protein, 10 aa, BK virus
LLFFWLGPSS

SEQ ID NO: 19118 - protein, 10 aa, BK virus
LFFWLGPSSY

SEQ ID NO: 19119 - protein, 10 aa, BK virus
FFWLGPSSYA

SEQ ID NO: 19120 - protein, 10 aa, BK virus
FWLGPSSYAS

SEQ ID NO: 19121 - protein, 10 aa, BK virus
WLGPSSYASR

SEQ ID NO: 19122 - protein, 10 aa, BK virus
LGPSSYASRA

SEQ ID NO: 19123 - protein, 10 aa, BK virus
GPSSYASRAG

SEQ ID NO: 19124 - protein, 10 aa, BK virus
PSSYASRAGV

SEQ ID NO: 19125 - protein, 10 aa, BK virus
SSYASRAGVT

SEQ ID NO: 19126 - protein, 10 aa, BK virus
SYASRAGVTV

SEQ ID NO: 19127 - protein, 10 aa, BK virus
YASRAGVTVP

SEQ ID NO: 19128 - protein, 10 aa, BK virus
ASRAGVTVPY

SEQ ID NO: 19129 - protein, 10 aa, BK virus
SRAGVTVPYR

SEQ ID NO: 19130 - protein, 10 aa, BK virus
RAGVTVPYRP

SEQ ID NO: 19131 - protein, 10 aa, BK virus
AGVTVPYRPR

SEQ ID NO: 19132 - protein, 10 aa, BK virus
GVTVPYRPRS

SEQ ID NO: 19133 - protein, 10 aa, BK virus
VTVPYRPRSK

SEQ ID NO: 19134 - protein, 10 aa, BK virus
TVPYRPRSKG

SEQ ID NO: 19135 - protein, 10 aa, BK virus
VPYRPRSKGN

SEQ ID NO: 19136 - protein, 10 aa, BK virus
PYRPRSKGNI

SEQ ID NO: 19137 - protein, 10 aa, BK virus
YRPRSKGNIH

SEQ ID NO: 19138 - protein, 10 aa, BK virus
LAPPGAIVFS

SEQ ID NO: 19139 - protein, 10 aa, BK virus
APPGAIVFSI

SEQ ID NO: 19140 - protein, 10 aa, BK virus
PPGAIVFSIN

SEQ ID NO: 19141 - protein, 10 aa, BK virus
PGAIVFSINS

SEQ ID NO: 19142 - protein, 10 aa, BK virus
GAIVFSINSP

SEQ ID NO: 19143 - protein, 10 aa, BK virus
AIVFSINSPE

SEQ ID NO: 19144 - protein, 10 aa, BK virus
IVFSINSPEC

SEQ ID NO: 19145 - protein, 10 aa, BK virus
VFSINSPECT

SEQ ID NO: 19146 - protein, 10 aa, BK virus
FSINSPECTL

SEQ ID NO: 19147 - protein, 10 aa, BK virus
SINSPECTLC

SEQ ID NO: 19148 - protein, 10 aa, BK virus
FLKSILCVTS

SEQ ID NO: 19149 - protein, 10 aa, BK virus
LKSILCVTSS

SEQ ID NO: 19150 - protein, 10 aa, BK virus
KSILCVTSSI

SEQ ID NO: 19151 - protein, 10 aa, BK virus
SILCVTSSIL

SEQ ID NO: 19152 - protein, 10 aa, BK virus
ILCVTSSILS

SEQ ID NO: 19153 - protein, 10 aa, BK virus
LCVTSSILSA

SEQ ID NO: 19154 - protein, 10 aa, BK virus
CVTSSILSAS

SEQ ID NO: 19155 - protein, 10 aa, BK virus
VTSSILSASS

SEQ ID NO: 19156 - protein, 10 aa, BK virus
TSSILSASSI

SEQ ID NO: 19157 - protein, 10 aa, BK virus
SSILSASSIL

SEQ ID NO: 19158 - protein, 10 aa, BK virus
VWPKCTRVPS

SEQ ID NO: 19159 - protein, 10 aa, BK virus
WPKCTRVPSL

SEQ ID NO: 19160 - protein, 10 aa, BK virus
PKCTRVPSLS

SEQ ID NO: 19161 - protein, 10 aa, BK virus
KCTRVPSLSA

SEQ ID NO: 19162 - protein, 10 aa, BK virus
CTRVPSLSAT

SEQ ID NO: 19163 - protein, 10 aa, BK virus
TRVPSLSATC

SEQ ID NO: 19164 - protein, 10 aa, BK virus
RVPSLSATCL

SEQ ID NO: 19165 - protein, 10 aa, BK virus
VPSLSATCLT

SEQ ID NO: 19166 - protein, 10 aa, BK virus
PSLSATCLTI

SEQ ID NO: 19167 - protein, 10 aa, BK virus
SLSATCLTIE

SEQ ID NO: 19168 - protein, 10 aa, BK virus
LSATCLTIEG

SEQ ID NO: 19169 - protein, 10 aa, BK virus
SATCLTIEGL

SEQ ID NO: 19170 - protein, 10 aa, BK virus
ATCLTIEGLI

SEQ ID NO: 19171 - protein, 10 aa, BK virus
TCLTIEGLIG

SEQ ID NO: 19172 - protein, 10 aa, BK virus
CLTIEGLIGE

SEQ ID NO: 19173 - protein, 10 aa, BK virus
LTIEGLIGER

SEQ ID NO: 19174 - protein, 10 aa, BK virus
TIEGLIGERS

SEQ ID NO: 19175 - protein, 10 aa, BK virus
IEGLIGERSE

SEQ ID NO: 19176 - protein, 10 aa, BK virus
KFIGAFTIVQ

SEQ ID NO: 19177 - protein, 10 aa, BK virus
FIGAFTIVQV

SEQ ID NO: 19178 - protein, 10 aa, BK virus
IGAFTIVQVV

SEQ ID NO: 19179 - protein, 10 aa, BK virus
GAFTIVQVVS

SEQ ID NO: 19180 - protein, 10 aa, BK virus
AFTIVQVVSS

SEQ ID NO: 19181 - protein, 10 aa, BK virus
FTIVQVVSSK

SEQ ID NO: 19182 - protein, 10 aa, BK virus
TIVQVVSSKN

SEQ ID NO: 19183 - protein, 10 aa, BK virus
IVQVVSSKNL

SEQ ID NO: 19184 - protein, 10 aa, BK virus
VQVVSSKNLA

SEQ ID NO: 19185 - protein, 10 aa, BK virus
QVVSSKNLAK

SEQ ID NO: 19186 - protein, 10 aa, BK virus
VVSSKNLAKE

SEQ ID NO: 19187 - protein, 10 aa, BK virus
VSSKNLAKES

SEQ ID NO: 19188 - protein, 10 aa, BK virus
SSKNLAKESL

SEQ ID NO: 19189 - protein, 10 aa, BK virus
SKNLAKESLK

SEQ ID NO: 19190 - protein, 10 aa, BK virus
KNLAKESLKN

SEQ ID NO: 19191 - protein, 10 aa, BK virus
NLAKESLKNL

SEQ ID NO: 19192 - protein, 10 aa, BK virus
LAKESLKNLS

SEQ ID NO: 19193 - protein, 10 aa, BK virus
AKESLKNLSV

SEQ ID NO: 19194 - protein, 10 aa, BK virus
KESLKNLSVL

SEQ ID NO: 19195 - protein, 10 aa, BK virus
ESLKNLSVLL

SEQ ID NO: 19196 - protein, 10 aa, BK virus
SLKNLSVLLC

SEQ ID NO: 19197 - protein, 10 aa, BK virus
LKNLSVLLCN

SEQ ID NO: 19198 - protein, 10 aa, BK virus
KNLSVLLCNS

SEQ ID NO: 19199 - protein, 10 aa, BK virus
NLSVLLCNSC

SEQ ID NO: 19200 - protein, 10 aa, BK virus
LSVLLCNSCE

SEQ ID NO: 19201 - protein, 10 aa, BK virus
SVLLCNSCEV

SEQ ID NO: 19202 - protein, 10 aa, BK virus
VLLCNSCEVI

SEQ ID NO: 19203 - protein, 10 aa, BK virus
LLCNSCEVIE

SEQ ID NO: 19204 - protein, 10 aa, BK virus
LCNSCEVIEG

SEQ ID NO: 19205 - protein, 10 aa, BK virus
CNSCEVIEGI

SEQ ID NO: 19206 - protein, 10 aa, BK virus
NSCEVIEGIS

SEQ ID NO: 19207 - protein, 10 aa, BK virus
SCEVIEGISS

SEQ ID NO: 19208 - protein, 10 aa, BK virus
CEVIEGISSL

SEQ ID NO: 19209 - protein, 10 aa, BK virus
EVIEGISSLI

SEQ ID NO: 19210 - protein, 10 aa, BK virus
VIEGISSLIT

SEQ ID NO: 19211 - protein, 10 aa, BK virus
IEGISSLITC

SEQ ID NO: 19212 - protein, 10 aa, BK virus
EGISSLITCH

SEQ ID NO: 19213 - protein, 10 aa, BK virus
GISSLITCHK

SEQ ID NO: 19214 - protein, 10 aa, BK virus
ISSLITCHKA

SEQ ID NO: 19215 - protein, 10 aa, BK virus
SSLITCHKAW

SEQ ID NO: 19216 - protein, 10 aa, BK virus
SLITCHKAWE

SEQ ID NO: 19217 - protein, 10 aa, BK virus
LITCHKAWEI

SEQ ID NO: 19218 - protein, 10 aa, BK virus
ITCHKAWEIV

SEQ ID NO: 19219 - protein, 10 aa, BK virus
TCHKAWEIVA

SEQ ID NO: 19220 - protein, 10 aa, BK virus
CHKAWEIVAN

SEQ ID NO: 19221 - protein, 10 aa, BK virus
HKAWEIVANK

SEQ ID NO: 19222 - protein, 10 aa, BK virus
KAWEIVANKE

SEQ ID NO: 19223 - protein, 10 aa, BK virus
AWEIVANKEG

SEQ ID NO: 19224 - protein, 10 aa, BK virus
WEIVANKEGP

SEQ ID NO: 19225 - protein, 10 aa, BK virus
EIVANKEGPQ

SEQ ID NO: 19226 - protein, 10 aa, BK virus
IVANKEGPQC

SEQ ID NO: 19227 - protein, 10 aa, BK virus
VANKEGPQCL

SEQ ID NO: 19228 - protein, 10 aa, BK virus
ANKEGPQCLG

SEQ ID NO: 19229 - protein, 10 aa, BK virus
NKEGPQCLGS

SEQ ID NO: 19230 - protein, 10 aa, BK virus
KEGPQCLGSR

SEQ ID NO: 19231 - protein, 10 aa, BK virus
EGPQCLGSRY

SEQ ID NO: 19232 - protein, 10 aa, BK virus
ILLTKVFTPG

SEQ ID NO: 19233 - protein, 10 aa, BK virus
LLTKVFTPGN

SEQ ID NO: 19234 - protein, 10 aa, BK virus
LTKVFTPGNR

SEQ ID NO: 19235 - protein, 10 aa, BK virus
TKVFTPGNRI

SEQ ID NO: 19236 - protein, 10 aa, BK virus
KVFTPGNRIS

SEQ ID NO: 19237 - protein, 10 aa, BK virus
YSSGLNNSKA

SEQ ID NO: 19238 - protein, 10 aa, BK virus
SSGLNNSKAM

SEQ ID NO: 19239 - protein, 10 aa, BK virus
SGLNNSKAMP

SEQ ID NO: 19240 - protein, 10 aa, BK virus
GLNNSKAMPD

SEQ ID NO: 19241 - protein, 10 aa, BK virus
LNNSKAMPDC

SEQ ID NO: 19242 - protein, 10 aa, BK virus
SQSSKNLYPT

SEQ ID NO: 19243 - protein, 10 aa, BK virus
IKAANPAIAP

SEQ ID NO: 19244 - protein, 10 aa, BK virus
KAANPAIAPG

SEQ ID NO: 19245 - protein, 10 aa, BK virus
AANPAIAPGA

SEQ ID NO: 19246 - protein, 10 aa, BK virus
ANPAIAPGAP

SEQ ID NO: 19247 - protein, 10 aa, BK virus
NPAIAPGAPA

SEQ ID NO: 19248 - protein, 10 aa, BK virus
PAIAPGAPAI

SEQ ID NO: 19249 - protein, 10 aa, BK virus
AIAPGAPAIT

SEQ ID NO: 19250 - protein, 10 aa, BK virus
IAPGAPAITA

SEQ ID NO: 19251 - protein, 10 aa, BK virus
APGAPAITAY

SEQ ID NO: 19252 - protein, 10 aa, BK virus
PGAPAITAYV

SEQ ID NO: 19253 - protein, 10 aa, BK virus
GVRPIAAIAS

SEQ ID NO: 19254 - protein, 10 aa, BK virus
VRPIAAIASE

SEQ ID NO: 19255 - protein, 10 aa, BK virus
RPIAAIASEV

SEQ ID NO: 19256 - protein, 10 aa, BK virus
PIAAIASEVL

SEQ ID NO: 19257 - protein, 10 aa, BK virus
IAAIASEVLV

SEQ ID NO: 19258 - protein, 10 aa, BK virus
AAIASEVLVM

SEQ ID NO: 19259 - protein, 10 aa, BK virus
AIASEVLVMP

SEQ ID NO: 19260 - protein, 10 aa, BK virus
IASEVLVMPS

SEQ ID NO: 19261 - protein, 10 aa, BK virus
ASEVLVMPST

SEQ ID NO: 19262 - protein, 10 aa, BK virus
SEVLVMPSTV

SEQ ID NO: 19263 - protein, 10 aa, BK virus
EVLVMPSTVA

SEQ ID NO: 19264 - protein, 10 aa, BK virus
VLVMPSTVAR

SEQ ID NO: 19265 - protein, 10 aa, BK virus
LVMPSTVARD

SEQ ID NO: 19266 - protein, 10 aa, BK virus
VMPSTVARDA

SEQ ID NO: 19267 - protein, 10 aa, BK virus
MPSTVARDAI

SEQ ID NO: 19268 - protein, 10 aa, BK virus
TSIAAAASPA

SEQ ID NO: 19269 - protein, 10 aa, BK virus
SIAAAASPAA

SEQ ID NO: 19270 - protein, 10 aa, BK virus
IAAAASPAAI

SEQ ID NO: 19271 - protein, 10 aa, BK virus
AAAASPAAIS

SEQ ID NO: 19272 - protein, 10 aa, BK virus
AAASPAAISA

SEQ ID NO: 19273 - protein, 10 aa, BK virus
AASPAAISAT

SEQ ID NO: 19274 - protein, 10 aa, BK virus
ASPAAISATE

SEQ ID NO: 19275 - protein, 10 aa, BK virus
SPAAISATEN

SEQ ID NO: 19276 - protein, 10 aa, BK virus
PAAISATENP

SEQ ID NO: 19277 - protein, 10 aa, BK virus
AAISATENPV

SEQ ID NO: 19278 - protein, 10 aa, BK virus
AISATENPVA

SEQ ID NO: 19279 - protein, 10 aa, BK virus
ISATENPVAA

SEQ ID NO: 19280 - protein, 10 aa, BK virus
SATENPVAAA

SEQ ID NO: 19281 - protein, 10 aa, BK virus
ATENPVAAAA

SEQ ID NO: 19282 - protein, 10 aa, BK virus
TENPVAAAAS

SEQ ID NO: 19283 - protein, 10 aa, BK virus
ENPVAAAASD

SEQ ID NO: 19284 - protein, 10 aa, BK virus
NPVAAAASDT

SEQ ID NO: 19285 - protein, 10 aa, BK virus
PVAAAASDTL

SEQ ID NO: 19286 - protein, 10 aa, BK virus
VAAAASDTLA

SEQ ID NO: 19287 - protein, 10 aa, BK virus
AAAASDTLAT

SEQ ID NO: 19288 - protein, 10 aa, BK virus
AAASDTLATR

SEQ ID NO: 19289 - protein, 10 aa, BK virus
AASDTLATRS

SEQ ID NO: 19290 - protein, 10 aa, BK virus
ASDTLATRSP

SEQ ID NO: 19291 - protein, 10 aa, BK virus
SDTLATRSPK

SEQ ID NO: 19292 - protein, 10 aa, BK virus
DTLATRSPKS

SEQ ID NO: 19293 - protein, 10 aa, BK virus
TLATRSPKSA

SEQ ID NO: 19294 - protein, 10 aa, BK virus
LATRSPKSAR

SEQ ID NO: 19295 - protein, 10 aa, BK virus
ATRSPKSARA

SEQ ID NO: 19296 - protein, 10 aa, BK virus
TRSPKSARAA

SEQ ID NO: 19297 - protein, 10 aa, BK virus
RSPKSARAAP

SEQ ID NO: 19298 - protein, 10 aa, BK virus
SPKSARAAPM

SEQ ID NO: 19299 - protein, 10 aa, BK virus
PKSARAAPMN

SEQ ID NO: 19300 - protein, 10 aa, BK virus
KSARAAPMNL

SEQ ID NO: 19301 - protein, 10 aa, BK virus
SARAAPMNLE

SEQ ID NO: 19302 - protein, 10 aa, BK virus
ARAAPMNLEI

SEQ ID NO: 19303 - protein, 10 aa, BK virus
RAAPMNLEIQ

SEQ ID NO: 19304 - protein, 10 aa, BK virus
AAPMNLEIQK

SEQ ID NO: 19305 - protein, 10 aa, BK virus
APMNLEIQKK

SEQ ID NO: 19306 - protein, 10 aa, BK virus
PMNLEIQKKR

SEQ ID NO: 19307 - protein, 10 aa, BK virus
MNLEIQKKRD

SEQ ID NO: 19308 - protein, 10 aa, BK virus
NLEIQKKRDY

SEQ ID NO: 19309 - protein, 10 aa, BK virus
LEIQKKRDYL

SEQ ID NO: 19310 - protein, 10 aa, BK virus
EIQKKRDYLP

SEQ ID NO: 19311 - protein, 10 aa, BK virus
IQKKRDYLPR

SEQ ID NO: 19312 - protein, 10 aa, BK virus
QKKRDYLPRS

SEQ ID NO: 19313 - protein, 10 aa, BK virus
KKRDYLPRSL

SEQ ID NO: 19314 - protein, 10 aa, BK virus
KRDYLPRSLL

SEQ ID NO: 19315 - protein, 10 aa, BK virus
RDYLPRSLLQ

SEQ ID NO: 19316 - protein, 10 aa, BK virus
DYLPRSLLQS

SEQ ID NO: 19317 - protein, 10 aa, BK virus
YLPRSLLQSL

SEQ ID NO: 19318 - protein, 10 aa, BK virus
LPRSLLQSLL

SEQ ID NO: 19319 - protein, 10 aa, BK virus
PRSLLQSLLQ

SEQ ID NO: 19320 - protein, 10 aa, BK virus
RSLLQSLLQQ

SEQ ID NO: 19321 - protein, 10 aa, BK virus
SLLQSLLQQV

SEQ ID NO: 19322 - protein, 10 aa, BK virus
LLQSLLQQVK

SEQ ID NO: 19323 - protein, 10 aa, BK virus
LQSLLQQVKQ

SEQ ID NO: 19324 - protein, 10 aa, BK virus
QSLLQQVKQW

SEQ ID NO: 19325 - protein, 10 aa, BK virus
SLLQQVKQWY

SEQ ID NO: 19326 - protein, 10 aa, BK virus
LLQQVKQWYF

SEQ ID NO: 19327 - protein, 10 aa, BK virus
LQQVKQWYFC

SEQ ID NO: 19328 - protein, 10 aa, BK virus
QQVKQWYFCF

SEQ ID NO: 19329 - protein, 10 aa, BK virus
QVKQWYFCFS

SEQ ID NO: 19330 - protein, 10 aa, BK virus
VKQWYFCFSR

SEQ ID NO: 19331 - protein, 10 aa, BK virus
KQWYFCFSRL

SEQ ID NO: 19332 - protein, 10 aa, BK virus
QWYFCFSRLH

SEQ ID NO: 19333 - protein, 10 aa, BK virus
WYFCFSRLHC

SEQ ID NO: 19334 - protein, 10 aa, BK virus
YFCFSRLHCL

SEQ ID NO: 19335 - protein, 10 aa, BK virus
FCFSRLHCLH

SEQ ID NO: 19336 - protein, 10 aa, BK virus
CFSRLHCLHL

SEQ ID NO: 19337 - protein, 10 aa, BK virus
FSRLHCLHLY

SEQ ID NO: 19338 - protein, 10 aa, BK virus
SRLHCLHLYK

SEQ ID NO: 19339 - protein, 10 aa, BK virus
RLHCLHLYKI

SEQ ID NO: 19340 - protein, 10 aa, BK virus
LHCLHLYKIP

SEQ ID NO: 19341 - protein, 10 aa, BK virus
HCLHLYKIPA

SEQ ID NO: 19342 - protein, 10 aa, BK virus
CLHLYKIPAK

SEQ ID NO: 19343 - protein, 10 aa, BK virus
LHLYKIPAKA

SEQ ID NO: 19344 - protein, 10 aa, BK virus
HLYKIPAKAL

SEQ ID NO: 19345 - protein, 10 aa, BK virus
LYKIPAKALK

SEQ ID NO: 19346 - protein, 10 aa, BK virus
KSSELFFLFQ

SEQ ID NO: 19347 - protein, 10 aa, BK virus
SSELFFLFQS

SEQ ID NO: 19348 - protein, 10 aa, BK virus
SELFFLFQSR

SEQ ID NO: 19349 - protein, 10 aa, BK virus
ELFFLFQSRF

SEQ ID NO: 19350 - protein, 10 aa, BK virus
LFFLFQSRFY

SEQ ID NO: 19351 - protein, 10 aa, BK virus
FFLFQSRFYQ

SEQ ID NO: 19352 - protein, 10 aa, BK virus
FLFQSRFYQL

SEQ ID NO: 19353 - protein, 10 aa, BK virus
LFQSRFYQLS

SEQ ID NO: 19354 - protein, 10 aa, BK virus
FQSRFYQLSL

SEQ ID NO: 19355 - protein, 10 aa, BK virus
QSRFYQLSLK

SEQ ID NO: 19356 - protein, 10 aa, BK virus
SRFYQLSLKL

SEQ ID NO: 19357 - protein, 10 aa, BK virus
RFYQLSLKLV

SEQ ID NO: 19358 - protein, 10 aa, BK virus
FYQLSLKLVV

SEQ ID NO: 19359 - protein, 10 aa, BK virus
YQLSLKLVVT

SEQ ID NO: 19360 - protein, 10 aa, BK virus
QLSLKLVVTA

SEQ ID NO: 19361 - protein, 10 aa, BK virus
LSLKLVVTAG

SEQ ID NO: 19362 - protein, 10 aa, BK virus
SLKLVVTAGA

SEQ ID NO: 19363 - protein, 10 aa, BK virus
LKLVVTAGAE

SEQ ID NO: 19364 - protein, 10 aa, BK virus
KLVVTAGAEP

SEQ ID NO: 19365 - protein, 10 aa, BK virus
LVVTAGAEPW

SEQ ID NO: 19366 - protein, 10 aa, BK virus
VVTAGAEPWP

SEQ ID NO: 19367 - protein, 10 aa, BK virus
VTAGAEPWPL

SEQ ID NO: 19368 - protein, 10 aa, BK virus
TAGAEPWPLS

SEQ ID NO: 19369 - protein, 10 aa, BK virus
AGAEPWPLSS

SEQ ID NO: 19370 - protein, 10 aa, BK virus
GAEPWPLSSL

SEQ ID NO: 19371 - protein, 10 aa, BK virus
AEPWPLSSLT

SEQ ID NO: 19372 - protein, 10 aa, BK virus
EPWPLSSLTG

SEQ ID NO: 19373 - protein, 10 aa, BK virus
PWPLSSLTGD

SEQ ID NO: 19374 - protein, 10 aa, BK virus
WPLSSLTGDK

SEQ ID NO: 19375 - protein, 10 aa, BK virus
PLSSLTGDKA

SEQ ID NO: 19376 - protein, 10 aa, BK virus
LSSLTGDKAK

SEQ ID NO: 19377 - protein, 10 aa, BK virus
SSLTGDKAKI

SEQ ID NO: 19378 - protein, 10 aa, BK virus
SLTGDKAKIP

SEQ ID NO: 19379 - protein, 10 aa, BK virus
LTGDKAKIPR

SEQ ID NO: 19380 - protein, 10 aa, BK virus
TGDKAKIPRL

SEQ ID NO: 19381 - protein, 10 aa, BK virus
GDKAKIPRLA

SEQ ID NO: 19382 - protein, 10 aa, BK virus
DKAKIPRLAK

SEQ ID NO: 19383 - protein, 10 aa, BK virus
KAKIPRLAKH

SEQ ID NO: 19384 - protein, 10 aa, BK virus
AKIPRLAKHV

SEQ ID NO: 19385 - protein, 10 aa, BK virus
KIPRLAKHVC

SEQ ID NO: 19386 - protein, 10 aa, BK virus
IPRLAKHVCH

SEQ ID NO: 19387 - protein, 10 aa, BK virus
PRLAKHVCHA

SEQ ID NO: 19388 - protein, 10 aa, BK virus
RLAKHVCHAL

SEQ ID NO: 19389 - protein, 10 aa, BK virus
LAKHVCHALS

SEQ ID NO: 19390 - protein, 10 aa, BK virus
AKHVCHALSF

SEQ ID NO: 19391 - protein, 10 aa, BK virus
KHVCHALSFL

SEQ ID NO: 19392 - protein, 10 aa, BK virus
HVCHALSFLR

SEQ ID NO: 19393 - protein, 10 aa, BK virus
VCHALSFLRS

SEQ ID NO: 19394 - protein, 10 aa, BK virus
CHALSFLRSW

SEQ ID NO: 19395 - protein, 10 aa, BK virus
HALSFLRSWF

SEQ ID NO: 19396 - protein, 10 aa, BK virus
ALSFLRSWFG

SEQ ID NO: 19397 - protein, 10 aa, BK virus
LSFLRSWFGC

SEQ ID NO: 19398 - protein, 10 aa, BK virus
SFLRSWFGCI

SEQ ID NO: 19399 - protein, 10 aa, BK virus
FLRSWFGCIP

SEQ ID NO: 19400 - protein, 10 aa, BK virus
LRSWFGCIPW

SEQ ID NO: 19401 - protein, 10 aa, BK virus
RSWFGCIPWV

SEQ ID NO: 19402 - protein, 10 aa, BK virus
SWFGCIPWVS

SEQ ID NO: 19403 - protein, 10 aa, BK virus
WFGCIPWVSS

SEQ ID NO: 19404 - protein, 10 aa, BK virus
FGCIPWVSSS

SEQ ID NO: 19405 - protein, 10 aa, BK virus
GCIPWVSSSS

SEQ ID NO: 19406 - protein, 10 aa, BK virus
CIPWVSSSSL

SEQ ID NO: 19407 - protein, 10 aa, BK virus
GHGLAAFPCE

SEQ ID NO: 19408 - protein, 10 aa, BK virus
HGLAAFPCES

SEQ ID NO: 19409 - protein, 10 aa, BK virus
GLAAFPCESC

SEQ ID NO: 19410 - protein, 10 aa, BK virus
LAAFPCESCT

SEQ ID NO: 19411 - protein, 10 aa, BK virus
AAFPCESCTF

SEQ ID NO: 19412 - protein, 10 aa, BK virus
AFPCESCTFL

SEQ ID NO: 19413 - protein, 10 aa, BK virus
FPCESCTFLP

SEQ ID NO: 19414 - protein, 10 aa, BK virus
PCESCTFLPE

SEQ ID NO: 19415 - protein, 10 aa, BK virus
CESCTFLPEV

SEQ ID NO: 19416 - protein, 10 aa, BK virus
ESCTFLPEVM

SEQ ID NO: 19417 - protein, 10 aa, BK virus
SCTFLPEVMV

SEQ ID NO: 19418 - protein, 10 aa, BK virus
CTFLPEVMVW

SEQ ID NO: 19419 - protein, 10 aa, BK virus
TFLPEVMVWL

SEQ ID NO: 19420 - protein, 10 aa, BK virus
FLPEVMVWLH

SEQ ID NO: 19421 - protein, 10 aa, BK virus
LPEVMVWLHS

SEQ ID NO: 19422 - protein, 10 aa, BK virus
PEVMVWLHSM

SEQ ID NO: 19423 - protein, 10 aa, BK virus
EVMVWLHSMG

SEQ ID NO: 19424 - protein, 10 aa, BK virus
VMVWLHSMGK

SEQ ID NO: 19425 - protein, 10 aa, BK virus
MVWLHSMGKQ

SEQ ID NO: 19426 - protein, 10 aa, BK virus
VWLHSMGKQL

SEQ ID NO: 19427 - protein, 10 aa, BK virus
WLHSMGKQLL

SEQ ID NO: 19428 - protein, 10 aa, BK virus
LHSMGKQLLP

SEQ ID NO: 19429 - protein, 10 aa, BK virus
HSMGKQLLPV

SEQ ID NO: 19430 - protein, 10 aa, BK virus
SMGKQLLPVA

SEQ ID NO: 19431 - protein, 10 aa, BK virus
MGKQLLPVAF

SEQ ID NO: 19432 - protein, 10 aa, BK virus
GKQLLPVAFF

SEQ ID NO: 19433 - protein, 10 aa, BK virus
KQLLPVAFFF

SEQ ID NO: 19434 - protein, 10 aa, BK virus
QLLPVAFFFI

SEQ ID NO: 19435 - protein, 10 aa, BK virus
LLPVAFFFII

SEQ ID NO: 19436 - protein, 10 aa, BK virus
LPVAFFFIIY

SEQ ID NO: 19437 - protein, 10 aa, BK virus
PVAFFFIIYK

SEQ ID NO: 19438 - protein, 10 aa, BK virus
VAFFFIIYKR

SEQ ID NO: 19439 - protein, 10 aa, BK virus
AFFFIIYKRP

SEQ ID NO: 19440 - protein, 10 aa, BK virus
FFFIIYKRPR

SEQ ID NO: 19441 - protein, 10 aa, BK virus
FFIIYKRPRP

SEQ ID NO: 19442 - protein, 10 aa, BK virus
FIIYKRPRPP

SEQ ID NO: 19443 - protein, 10 aa, BK virus
IIYKRPRPPL

SEQ ID NO: 19444 - protein, 10 aa, BK virus
IYKRPRPPLP

SEQ ID NO: 19445 - protein, 10 aa, BK virus
YKRPRPPLPP

SEQ ID NO: 19446 - protein, 10 aa, BK virus
KRPRPPLPPP

SEQ ID NO: 19447 - protein, 10 aa, BK virus
RPRPPLPPPF

SEQ ID NO: 19448 - protein, 10 aa, BK virus
PRPPLPPPFL

SEQ ID NO: 19449 - protein, 10 aa, BK virus
RPPLPPPFLS

SEQ ID NO: 19450 - protein, 10 aa, BK virus
PPLPPPFLSS

SEQ ID NO: 19451 - protein, 10 aa, BK virus
PLPPPFLSSS

SEQ ID NO: 19452 - protein, 10 aa, BK virus
LPPPFLSSSK

SEQ ID NO: 19453 - protein, 10 aa, BK virus
PPPFLSSSKG

SEQ ID NO: 19454 - protein, 10 aa, BK virus
PPFLSSSKGV

SEQ ID NO: 19455 - protein, 10 aa, BK virus
PFLSSSKGVE

SEQ ID NO: 19456 - protein, 10 aa, BK virus
FLSSSKGVEA

SEQ ID NO: 19457 - protein, 10 aa, BK virus
LSSSKGVEAF

SEQ ID NO: 19458 - protein, 10 aa, BK virus
SSSKGVEAFS

SEQ ID NO: 19459 - protein, 10 aa, BK virus
SSKGVEAFSE

SEQ ID NO: 19460 - protein, 10 aa, BK virus
SKGVEAFSEA

SEQ ID NO: 19461 - protein, 10 aa, BK virus
QNYLGKSLFF

SEQ ID NO: 19462 - protein, 10 aa, BK virus
NYLGKSLFFC

SEQ ID NO: 19463 - protein, 10 aa, BK virus
YLGKSLFFCN

SEQ ID NO: 19464 - protein, 10 aa, BK virus
LGKSLFFCNF

SEQ ID NO: 19465 - protein, 10 aa, BK virus
GKSLFFCNFC

SEQ ID NO: 19466 - protein, 10 aa, BK virus
KSLFFCNFCK

SEQ ID NO: 19467 - protein, 11 aa, BK virus
WIKFLTGKNPW

SEQ ID NO: 19468 - protein, 11 aa, BK virus
IKFLTGKNPWS

SEQ ID NO: 19469 - protein, 11 aa, BK virus
KFLTGKNPWSS

SEQ ID NO: 19470 - protein, 11 aa, BK virus
FLTGKNPWSSW

SEQ ID NO: 19471 - protein, 11 aa, BK virus
LTGKNPWSSWT

SEQ ID NO: 19472 - protein, 11 aa, BK virus
TGKNPWSSWTF

SEQ ID NO: 19473 - protein, 11 aa, BK virus
ALKELPGEIFP

SEQ ID NO: 19474 - protein, 11 aa, BK virus
GSVRNFTLTKG

SEQ ID NO: 19475 - protein, 11 aa, BK virus
SVRNFTLTKGA

SEQ ID NO: 19476 - protein, 11 aa, BK virus
VRNFTLTKGAT

SEQ ID NO: 19477 - protein, 11 aa, BK virus
RNFTLTKGATR

SEQ ID NO: 19478 - protein, 11 aa, BK virus
NFTLTKGATRI

SEQ ID NO: 19479 - protein, 11 aa, BK virus
FTLTKGATRIK

SEQ ID NO: 19480 - protein, 11 aa, BK virus
LISLILEPGVA

SEQ ID NO: 19481 - protein, 11 aa, BK virus
ISLILEPGVAQ

SEQ ID NO: 19482 - protein, 11 aa, BK virus
SLILEPGVAQR

SEQ ID NO: 19483 - protein, 11 aa, BK virus
LILEPGVAQRF

SEQ ID NO: 19484 - protein, 11 aa, BK virus
ILEPGVAQRFV

SEQ ID NO: 19485 - protein, 11 aa, BK virus
LEPGVAQRFVL

SEQ ID NO: 19486 - protein, 11 aa, BK virus
EPGVAQRFVLI

SEQ ID NO: 19487 - protein, 11 aa, BK virus
PGVAQRFVLIF

SEQ ID NO: 19488 - protein, 11 aa, BK virus
GVAQRFVLIFL

SEQ ID NO: 19489 - protein, 11 aa, BK virus
VAQRFVLIFLF

SEQ ID NO: 19490 - protein, 11 aa, BK virus
AQRFVLIFLFA

SEQ ID NO: 19491 - protein, 11 aa, BK virus
QRFVLIFLFAQ

SEQ ID NO: 19492 - protein, 11 aa, BK virus
RFVLIFLFAQI

SEQ ID NO: 19493 - protein, 11 aa, BK virus
FVLIFLFAQIP

SEQ ID NO: 19494 - protein, 11 aa, BK virus
VLIFLFAQIPC

SEQ ID NO: 19495 - protein, 11 aa, BK virus
LIFLFAQIPCT

SEQ ID NO: 19496 - protein, 11 aa, BK virus
IFLFAQIPCTA

SEQ ID NO: 19497 - protein, 11 aa, BK virus
FLFAQIPCTAR

SEQ ID NO: 19498 - protein, 11 aa, BK virus
LFAQIPCTARN

SEQ ID NO: 19499 - protein, 11 aa, BK virus
FAQIPCTARNG

SEQ ID NO: 19500 - protein, 11 aa, BK virus
AQIPCTARNGL

SEQ ID NO: 19501 - protein, 11 aa, BK virus
QIPCTARNGLF

SEQ ID NO: 19502 - protein, 11 aa, BK virus
IPCTARNGLFV

SEQ ID NO: 19503 - protein, 11 aa, BK virus
PCTARNGLFVP

SEQ ID NO: 19504 - protein, 11 aa, BK virus
CTARNGLFVPK

SEQ ID NO: 19505 - protein, 11 aa, BK virus
TARNGLFVPKS

SEQ ID NO: 19506 - protein, 11 aa, BK virus
ARNGLFVPKSL

SEQ ID NO: 19507 - protein, 11 aa, BK virus
RNGLFVPKSLL

SEQ ID NO: 19508 - protein, 11 aa, BK virus
NGLFVPKSLLC

SEQ ID NO: 19509 - protein, 11 aa, BK virus
GLFVPKSLLCT

SEQ ID NO: 19510 - protein, 11 aa, BK virus
LFVPKSLLCTA

SEQ ID NO: 19511 - protein, 11 aa, BK virus
FVPKSLLCTAL

SEQ ID NO: 19512 - protein, 11 aa, BK virus
VPKSLLCTALA

SEQ ID NO: 19513 - protein, 11 aa, BK virus
PKSLLCTALAC

SEQ ID NO: 19514 - protein, 11 aa, BK virus
KSLLCTALACY

SEQ ID NO: 19515 - protein, 11 aa, BK virus
SLLCTALACYV

SEQ ID NO: 19516 - protein, 11 aa, BK virus
LLCTALACYVS

SEQ ID NO: 19517 - protein, 11 aa, BK virus
LCTALACYVSL

SEQ ID NO: 19518 - protein, 11 aa, BK virus
CTALACYVSLD

SEQ ID NO: 19519 - protein, 11 aa, BK virus
IATALTASHSG

SEQ ID NO: 19520 - protein, 11 aa, BK virus
ATALTASHSGL

SEQ ID NO: 19521 - protein, 11 aa, BK virus
TALTASHSGLA

SEQ ID NO: 19522 - protein, 11 aa, BK virus
SFKVTNLYLDK

SEQ ID NO: 19523 - protein, 11 aa, BK virus
VIIFFIGANLW

SEQ ID NO: 19524 - protein, 11 aa, BK virus
IIFFIGANLWN

SEQ ID NO: 19525 - protein, 11 aa, BK virus
IFFIGANLWNR

SEQ ID NO: 19526 - protein, 11 aa, BK virus
FFIGANLWNRR

SEQ ID NO: 19527 - protein, 11 aa, BK virus
FIGANLWNRRV

SEQ ID NO: 19528 - protein, 11 aa, BK virus
IGANLWNRRVG

SEQ ID NO: 19529 - protein, 11 aa, BK virus
GANLWNRRVGV

SEQ ID NO: 19530 - protein, 11 aa, BK virus
ANLWNRRVGVL

SEQ ID NO: 19531 - protein, 11 aa, BK virus
NLWNRRVGVLV

SEQ ID NO: 19532 - protein, 11 aa, BK virus
LWNRRVGVLVE

SEQ ID NO: 19533 - protein, 11 aa, BK virus
WNRRVGVLVEF

SEQ ID NO: 19534 - protein, 11 aa, BK virus
NRRVGVLVEFL

SEQ ID NO: 19535 - protein, 11 aa, BK virus
RSNSRFSTLNT

SEQ ID NO: 19536 - protein, 11 aa, BK virus
SNSRFSTLNTT

SEQ ID NO: 19537 - protein, 11 aa, BK virus
NSRFSTLNTTQ

SEQ ID NO: 19538 - protein, 11 aa, BK virus
SRFSTLNTTQK

SEQ ID NO: 19539 - protein, 11 aa, BK virus
RFSTLNTTQKK

SEQ ID NO: 19540 - protein, 11 aa, BK virus
FSTLNTTQKKK

SEQ ID NO: 19541 - protein, 11 aa, BK virus
STLNTTQKKKK

SEQ ID NO: 19542 - protein, 11 aa, BK virus
TLNTTQKKKKG

SEQ ID NO: 19543 - protein, 11 aa, BK virus
LNTTQKKKKGR

SEQ ID NO: 19544 - protein, 11 aa, BK virus
NTTQKKKKGRR

SEQ ID NO: 19545 - protein, 11 aa, BK virus
TTQKKKKGRRP

SEQ ID NO: 19546 - protein, 11 aa, BK virus
KTYGKIFCNFY

SEQ ID NO: 19547 - protein, 11 aa, BK virus
RSIPYYRRKHS

SEQ ID NO: 19548 - protein, 11 aa, BK virus
SIPYYRRKHSR

SEQ ID NO: 19549 - protein, 11 aa, BK virus
IPYYRRKHSRG

SEQ ID NO: 19550 - protein, 11 aa, BK virus
PYYRRKHSRGL

SEQ ID NO: 19551 - protein, 11 aa, BK virus
YYRRKHSRGLK

SEQ ID NO: 19552 - protein, 11 aa, BK virus
YRRKHSRGLKG

SEQ ID NO: 19553 - protein, 11 aa, BK virus
RRKHSRGLKGA

SEQ ID NO: 19554 - protein, 11 aa, BK virus
RNKAGVLEINY

SEQ ID NO: 19555 - protein, 11 aa, BK virus
GCVFIIRYVFR

SEQ ID NO: 19556 - protein, 11 aa, BK virus
CVFIIRYVFRI

SEQ ID NO: 19557 - protein, 11 aa, BK virus
VFIIRYVFRIS

SEQ ID NO: 19558 - protein, 11 aa, BK virus
FIIRYVFRISI

SEQ ID NO: 19559 - protein, 11 aa, BK virus
IIRYVFRISIQ

SEQ ID NO: 19560 - protein, 11 aa, BK virus
IRYVFRISIQC

SEQ ID NO: 19561 - protein, 11 aa, BK virus
RYVFRISIQCR

SEQ ID NO: 19562 - protein, 11 aa, BK virus
YVFRISIQCRG

SEQ ID NO: 19563 - protein, 11 aa, BK virus
VFRISIQCRGV

SEQ ID NO: 19564 - protein, 11 aa, BK virus
KVSEKRPALSL

SEQ ID NO: 19565 - protein, 11 aa, BK virus
KALCKCYYFCR

SEQ ID NO: 19566 - protein, 11 aa, BK virus
ALCKCYYFCRK

SEQ ID NO: 19567 - protein, 11 aa, BK virus
KSKKYLSASSR

SEQ ID NO: 19568 - protein, 11 aa, BK virus
SKKYLSASSRY

SEQ ID NO: 19569 - protein, 11 aa, BK virus
KKYLSASSRYS

SEQ ID NO: 19570 - protein, 11 aa, BK virus
KYLSASSRYSF

SEQ ID NO: 19571 - protein, 11 aa, BK virus
YLSASSRYSFS

SEQ ID NO: 19572 - protein, 11 aa, BK virus
KKSRYPSYDQG

SEQ ID NO: 19573 - protein, 11 aa, BK virus
KSRYPSYDQGR

SEQ ID NO: 19574 - protein, 11 aa, BK virus
SRYPSYDQGRN

SEQ ID NO: 19575 - protein, 11 aa, BK virus
RYPSYDQGRNA

SEQ ID NO: 19576 - protein, 11 aa, BK virus
YPSYDQGRNAN

SEQ ID NO: 19577 - protein, 11 aa, BK virus
PSYDQGRNANR

SEQ ID NO: 19578 - protein, 11 aa, BK virus
SYDQGRNANRK

SEQ ID NO: 19579 - protein, 11 aa, BK virus
YDQGRNANRKI

SEQ ID NO: 19580 - protein, 11 aa, BK virus
DQGRNANRKIQ

SEQ ID NO: 19581 - protein, 11 aa, BK virus
QGRNANRKIQS

SEQ ID NO: 19582 - protein, 11 aa, BK virus
GRNANRKIQSY

SEQ ID NO: 19583 - protein, 11 aa, BK virus
RNANRKIQSYI

SEQ ID NO: 19584 - protein, 11 aa, BK virus
NANRKIQSYIR

SEQ ID NO: 19585 - protein, 11 aa, BK virus
NGFNIWSSWKC

SEQ ID NO: 19586 - protein, 11 aa, BK virus
GFNIWSSWKCC

SEQ ID NO: 19587 - protein, 11 aa, BK virus
FNIWSSWKCCT

SEQ ID NO: 19588 - protein, 11 aa, BK virus
NIWSSWKCCTR

SEQ ID NO: 19589 - protein, 11 aa, BK virus
IWSSWKCCTRT

SEQ ID NO: 19590 - protein, 11 aa, BK virus
WSSWKCCTRTI

SEQ ID NO: 19591 - protein, 11 aa, BK virus
SSWKCCTRTIY

SEQ ID NO: 19592 - protein, 11 aa, BK virus
SWKCCTRTIYG

SEQ ID NO: 19593 - protein, 11 aa, BK virus
WKCCTRTIYGR

SEQ ID NO: 19594 - protein, 11 aa, BK virus
KCCTRTIYGRC

SEQ ID NO: 19595 - protein, 11 aa, BK virus
CCTRTIYGRCC

SEQ ID NO: 19596 - protein, 11 aa, BK virus
CTRTIYGRCCL

SEQ ID NO: 19597 - protein, 11 aa, BK virus
TRTIYGRCCLA

SEQ ID NO: 19598 - protein, 11 aa, BK virus
RTIYGRCCLAA

SEQ ID NO: 19599 - protein, 11 aa, BK virus
TIYGRCCLAAL

SEQ ID NO: 19600 - protein, 11 aa, BK virus
IYGRCCLAALF

SEQ ID NO: 19601 - protein, 11 aa, BK virus
YGRCCLAALFA

SEQ ID NO: 19602 - protein, 11 aa, BK virus
GRCCLAALFAT

SEQ ID NO: 19603 - protein, 11 aa, BK virus
WKNNTSCRVIR

SEQ ID NO: 19604 - protein, 11 aa, BK virus
KNNTSCRVIRF

SEQ ID NO: 19605 - protein, 11 aa, BK virus
NNTSCRVIRFV

SEQ ID NO: 19606 - protein, 11 aa, BK virus
NTSCRVIRFVW

SEQ ID NO: 19607 - protein, 11 aa, BK virus
TSCRVIRFVWW

SEQ ID NO: 19608 - protein, 11 aa, BK virus
SLKCKPTHGKA

SEQ ID NO: 19609 - protein, 11 aa, BK virus
LKCKPTHGKAN

SEQ ID NO: 19610 - protein, 11 aa, BK virus
KCKPTHGKANL

SEQ ID NO: 19611 - protein, 11 aa, BK virus
ARCSYRSVHGC

SEQ ID NO: 19612 - protein, 11 aa, BK virus
RCSYRSVHGCF

SEQ ID NO: 19613 - protein, 11 aa, BK virus
IKGFAFRTWNK

SEQ ID NO: 19614 - protein, 11 aa, BK virus
KGFAFRTWNKQ

SEQ ID NO: 19615 - protein, 11 aa, BK virus
GFAFRTWNKQF

SEQ ID NO: 19616 - protein, 11 aa, BK virus
FAFRTWNKQFR

SEQ ID NO: 19617 - protein, 11 aa, BK virus
AFRTWNKQFRQ

SEQ ID NO: 19618 - protein, 11 aa, BK virus
FRTWNKQFRQF

SEQ ID NO: 19619 - protein, 11 aa, BK virus
RTWNKQFRQFE

SEQ ID NO: 19620 - protein, 11 aa, BK virus
TWNKQFRQFER

SEQ ID NO: 19621 - protein, 11 aa, BK virus
WNKQFRQFERL

SEQ ID NO: 19622 - protein, 11 aa, BK virus
NKQFRQFERLF

SEQ ID NO: 19623 - protein, 11 aa, BK virus
KQFRQFERLFR

SEQ ID NO: 19624 - protein, 11 aa, BK virus
QFRQFERLFRW

SEQ ID NO: 19625 - protein, 11 aa, BK virus
FRQFERLFRWK

SEQ ID NO: 19626 - protein, 11 aa, BK virus
RQFERLFRWKC

SEQ ID NO: 19627 - protein, 11 aa, BK virus
GKFRKETFKQK

SEQ ID NO: 19628 - protein, 11 aa, BK virus
KFRKETFKQKN

SEQ ID NO: 19629 - protein, 11 aa, BK virus
FRKETFKQKNP

SEQ ID NO: 19630 - protein, 11 aa, BK virus
RKETFKQKNPN

SEQ ID NO: 19631 - protein, 11 aa, BK virus
KETFKQKNPNI

SEQ ID NO: 19632 - protein, 11 aa, BK virus
ETFKQKNPNIS

SEQ ID NO: 19633 - protein, 11 aa, BK virus
TFKQKNPNIST

SEQ ID NO: 19634 - protein, 11 aa, BK virus
FKQKNPNISTR

SEQ ID NO: 19635 - protein, 11 aa, BK virus
KQKNPNISTRL

SEQ ID NO: 19636 - protein, 11 aa, BK virus
QKNPNISTRLG

SEQ ID NO: 19637 - protein, 11 aa, BK virus
KNPNISTRLGY

SEQ ID NO: 19638 - protein, 11 aa, BK virus
NPNISTRLGYN

SEQ ID NO: 19639 - protein, 11 aa, BK virus
PNISTRLGYNE

SEQ ID NO: 19640 - protein, 11 aa, BK virus
AQNIFKKILTK

SEQ ID NO: 19641 - protein, 11 aa, BK virus
QNIFKKILTKL

SEQ ID NO: 19642 - protein, 11 aa, BK virus
NIFKKILTKLR

SEQ ID NO: 19643 - protein, 11 aa, BK virus
IFKKILTKLRV

SEQ ID NO: 19644 - protein, 11 aa, BK virus
FKKILTKLRVL

SEQ ID NO: 19645 - protein, 11 aa, BK virus
KKILTKLRVLT

SEQ ID NO: 19646 - protein, 11 aa, BK virus
KKNFTKWNDLV

SEQ ID NO: 19647 - protein, 11 aa, BK virus
KNFTKWNDLVA

SEQ ID NO: 19648 - protein, 11 aa, BK virus
NFTKWNDLVAT

SEQ ID NO: 19649 - protein, 11 aa, BK virus
FTKWNDLVATA

SEQ ID NO: 19650 - protein, 11 aa, BK virus
TKWNDLVATAN

SEQ ID NO: 19651 - protein, 11 aa, BK virus
KWNDLVATANL

SEQ ID NO: 19652 - protein, 11 aa, BK virus
WNDLVATANLV

SEQ ID NO: 19653 - protein, 11 aa, BK virus
DKYVYFFKDEI

SEQ ID NO: 19654 - protein, 11 aa, BK virus
IPITMLFPSLR

SEQ ID NO: 19655 - protein, 11 aa, BK virus
PITMLFPSLRY

SEQ ID NO: 19656 - protein, 11 aa, BK virus
ITMLFPSLRYF

SEQ ID NO: 19657 - protein, 11 aa, BK virus
TMLFPSLRYFS

SEQ ID NO: 19658 - protein, 11 aa, BK virus
MLFPSLRYFSP

SEQ ID NO: 19659 - protein, 11 aa, BK virus
LFPSLRYFSPC

SEQ ID NO: 19660 - protein, 11 aa, BK virus
KWLIQKQHLLN

SEQ ID NO: 19661 - protein, 11 aa, BK virus
WLIQKQHLLNV

SEQ ID NO: 19662 - protein, 11 aa, BK virus
LIQKQHLLNVY

SEQ ID NO: 19663 - protein, 11 aa, BK virus
IQKQHLLNVYV

SEQ ID NO: 19664 - protein, 11 aa, BK virus
QKQHLLNVYVQ

SEQ ID NO: 19665 - protein, 11 aa, BK virus
KHLFKAFWFAI

SEQ ID NO: 19666 - protein, 11 aa, BK virus
HLFKAFWFAIV

SEQ ID NO: 19667 - protein, 11 aa, BK virus
LFKAFWFAIVP

SEQ ID NO: 19668 - protein, 11 aa, BK virus
FKAFWFAIVPV

SEQ ID NO: 19669 - protein, 11 aa, BK virus
KAFWFAIVPVC

SEQ ID NO: 19670 - protein, 11 aa, BK virus
AFWFAIVPVCQ

SEQ ID NO: 19671 - protein, 11 aa, BK virus
FWFAIVPVCQY

SEQ ID NO: 19672 - protein, 11 aa, BK virus
WFAIVPVCQYI

SEQ ID NO: 19673 - protein, 11 aa, BK virus
FAIVPVCQYIL

SEQ ID NO: 19674 - protein, 11 aa, BK virus
AIVPVCQYILS

SEQ ID NO: 19675 - protein, 11 aa, BK virus
IVPVCQYILSY

SEQ ID NO: 19676 - protein, 11 aa, BK virus
VPVCQYILSYL

SEQ ID NO: 19677 - protein, 11 aa, BK virus
PVCQYILSYLG

SEQ ID NO: 19678 - protein, 11 aa, BK virus
VCQYILSYLGP

SEQ ID NO: 19679 - protein, 11 aa, BK virus
CQYILSYLGPL

SEQ ID NO: 19680 - protein, 11 aa, BK virus
QYILSYLGPLE

SEQ ID NO: 19681 - protein, 11 aa, BK virus
YILSYLGPLEV

SEQ ID NO: 19682 - protein, 11 aa, BK virus
ILSYLGPLEVF

SEQ ID NO: 19683 - protein, 11 aa, BK virus
LSYLGPLEVFL

SEQ ID NO: 19684 - protein, 11 aa, BK virus
SYLGPLEVFLC

SEQ ID NO: 19685 - protein, 11 aa, BK virus
YLGPLEVFLCH

SEQ ID NO: 19686 - protein, 11 aa, BK virus
LGPLEVFLCHQ

SEQ ID NO: 19687 - protein, 11 aa, BK virus
GPLEVFLCHQT

SEQ ID NO: 19688 - protein, 11 aa, BK virus
PLEVFLCHQTP

SEQ ID NO: 19689 - protein, 11 aa, BK virus
AAHPLSGFSCL

SEQ ID NO: 19690 - protein, 11 aa, BK virus
GHLAKRKLGKD

SEQ ID NO: 19691 - protein, 11 aa, BK virus
HLAKRKLGKDS

SEQ ID NO: 19692 - protein, 11 aa, BK virus
LAKRKLGKDSL

SEQ ID NO: 19693 - protein, 11 aa, BK virus
AKRKLGKDSLQ

SEQ ID NO: 19694 - protein, 11 aa, BK virus
KRKLGKDSLQI

SEQ ID NO: 19695 - protein, 11 aa, BK virus
RKLGKDSLQIF

SEQ ID NO: 19696 - protein, 11 aa, BK virus
KLGKDSLQIFF

SEQ ID NO: 19697 - protein, 11 aa, BK virus
LGKDSLQIFFS

SEQ ID NO: 19698 - protein, 11 aa, BK virus
GKDSLQIFFSG

SEQ ID NO: 19699 - protein, 11 aa, BK virus
KDSLQIFFSGG

SEQ ID NO: 19700 - protein, 11 aa, BK virus
DSLQIFFSGGS

SEQ ID NO: 19701 - protein, 11 aa, BK virus
NILQGLSTVVF

SEQ ID NO: 19702 - protein, 11 aa, BK virus
ILQGLSTVVFQ

SEQ ID NO: 19703 - protein, 11 aa, BK virus
LQGLSTVVFQS

SEQ ID NO: 19704 - protein, 11 aa, BK virus
QGLSTVVFQSC

SEQ ID NO: 19705 - protein, 11 aa, BK virus
TGHKYQQLKHT

SEQ ID NO: 19706 - protein, 11 aa, BK virus
GHKYQQLKHTG

SEQ ID NO: 19707 - protein, 11 aa, BK virus
HKYQQLKHTGY

SEQ ID NO: 19708 - protein, 11 aa, BK virus
KYQQLKHTGYQ

SEQ ID NO: 19709 - protein, 11 aa, BK virus
YQQLKHTGYQL

SEQ ID NO: 19710 - protein, 11 aa, BK virus
QQLKHTGYQLY

SEQ ID NO: 19711 - protein, 11 aa, BK virus
QLKHTGYQLYK

SEQ ID NO: 19712 - protein, 11 aa, BK virus
LKHTGYQLYKE

SEQ ID NO: 19713 - protein, 11 aa, BK virus
KHTGYQLYKEA

SEQ ID NO: 19714 - protein, 11 aa, BK virus
HTGYQLYKEAP

SEQ ID NO: 19715 - protein, 11 aa, BK virus
TGYQLYKEAPH

SEQ ID NO: 19716 - protein, 11 aa, BK virus
GYQLYKEAPHP

SEQ ID NO: 19717 - protein, 11 aa, BK virus
YQLYKEAPHPV

SEQ ID NO: 19718 - protein, 11 aa, BK virus
QLYKEAPHPVH

SEQ ID NO: 19719 - protein, 11 aa, BK virus
LYKEAPHPVHL

SEQ ID NO: 19720 - protein, 11 aa, BK virus
YKEAPHPVHLA

SEQ ID NO: 19721 - protein, 11 aa, BK virus
KEAPHPVHLAT

SEQ ID NO: 19722 - protein, 11 aa, BK virus
EAPHPVHLATL

SEQ ID NO: 19723 - protein, 11 aa, BK virus
APHPVHLATLW

SEQ ID NO: 19724 - protein, 11 aa, BK virus
LCWSHEVLGEH

SEQ ID NO: 19725 - protein, 11 aa, BK virus
CWSHEVLGEHF

SEQ ID NO: 19726 - protein, 11 aa, BK virus
WSHEVLGEHFP

SEQ ID NO: 19727 - protein, 11 aa, BK virus
SHEVLGEHFPL

SEQ ID NO: 19728 - protein, 11 aa, BK virus
HEVLGEHFPLL

SEQ ID NO: 19729 - protein, 11 aa, BK virus
HFHFYWDQVPS

SEQ ID NO: 19730 - protein, 11 aa, BK virus
FHFYWDQVPST

SEQ ID NO: 19731 - protein, 11 aa, BK virus
HFYWDQVPSTQ

SEQ ID NO: 19732 - protein, 11 aa, BK virus
FYWDQVPSTQL

SEQ ID NO: 19733 - protein, 11 aa, BK virus
YWDQVPSTQLD

SEQ ID NO: 19734 - protein, 11 aa, BK virus
WDQVPSTQLDK

SEQ ID NO: 19735 - protein, 11 aa, BK virus
DQVPSTQLDKH

SEQ ID NO: 19736 - protein, 11 aa, BK virus
QVPSTQLDKHC

SEQ ID NO: 19737 - protein, 11 aa, BK virus
VPSTQLDKHCF

SEQ ID NO: 19738 - protein, 11 aa, BK virus
PSTQLDKHCFC

SEQ ID NO: 19739 - protein, 11 aa, BK virus
STQLDKHCFCP

SEQ ID NO: 19740 - protein, 11 aa, BK virus
TQLDKHCFCPN

SEQ ID NO: 19741 - protein, 11 aa, BK virus
QLDKHCFCPNR

SEQ ID NO: 19742 - protein, 11 aa, BK virus
LDKHCFCPNRP

SEQ ID NO: 19743 - protein, 11 aa, BK virus
DKHCFCPNRPY

SEQ ID NO: 19744 - protein, 11 aa, BK virus
KHCFCPNRPYG

SEQ ID NO: 19745 - protein, 11 aa, BK virus
HCFCPNRPYGQ

SEQ ID NO: 19746 - protein, 11 aa, BK virus
CFCPNRPYGQY

SEQ ID NO: 19747 - protein, 11 aa, BK virus
FCPNRPYGQYS

SEQ ID NO: 19748 - protein, 11 aa, BK virus
CPNRPYGQYSL

SEQ ID NO: 19749 - protein, 11 aa, BK virus
PNRPYGQYSLP

SEQ ID NO: 19750 - protein, 11 aa, BK virus
NRPYGQYSLPG

SEQ ID NO: 19751 - protein, 11 aa, BK virus
RPYGQYSLPGT

SEQ ID NO: 19752 - protein, 11 aa, BK virus
PYGQYSLPGTG

SEQ ID NO: 19753 - protein, 11 aa, BK virus
YGQYSLPGTGL

SEQ ID NO: 19754 - protein, 11 aa, BK virus
GQYSLPGTGLL

SEQ ID NO: 19755 - protein, 11 aa, BK virus
QYSLPGTGLLG

SEQ ID NO: 19756 - protein, 11 aa, BK virus
YSLPGTGLLGF

SEQ ID NO: 19757 - protein, 11 aa, BK virus
YHQGTLTCNSL

SEQ ID NO: 19758 - protein, 11 aa, BK virus
HQGTLTCNSLA

SEQ ID NO: 19759 - protein, 11 aa, BK virus
QGTLTCNSLAL

SEQ ID NO: 19760 - protein, 11 aa, BK virus
GTLTCNSLALP

SEQ ID NO: 19761 - protein, 11 aa, BK virus
TLTCNSLALPA

SEQ ID NO: 19762 - protein, 11 aa, BK virus
LTCNSLALPAF

SEQ ID NO: 19763 - protein, 11 aa, BK virus
TCNSLALPAFP

SEQ ID NO: 19764 - protein, 11 aa, BK virus
CNSLALPAFPR

SEQ ID NO: 19765 - protein, 11 aa, BK virus
NSLALPAFPRV

SEQ ID NO: 19766 - protein, 11 aa, BK virus
SLALPAFPRVL

SEQ ID NO: 19767 - protein, 11 aa, BK virus
LALPAFPRVLH

SEQ ID NO: 19768 - protein, 11 aa, BK virus
ALPAFPRVLHL

SEQ ID NO: 19769 - protein, 11 aa, BK virus
LPAFPRVLHLQ

SEQ ID NO: 19770 - protein, 11 aa, BK virus
PAFPRVLHLQQ

SEQ ID NO: 19771 - protein, 11 aa, BK virus
AFPRVLHLQQR

SEQ ID NO: 19772 - protein, 11 aa, BK virus
FPRVLHLQQRS

SEQ ID NO: 19773 - protein, 11 aa, BK virus
PRVLHLQQRSG

SEQ ID NO: 19774 - protein, 11 aa, BK virus
RVLHLQQRSGN

SEQ ID NO: 19775 - protein, 11 aa, BK virus
VLHLQQRSGNY

SEQ ID NO: 19776 - protein, 11 aa, BK virus
LHLQQRSGNYC

SEQ ID NO: 19777 - protein, 11 aa, BK virus
HLQQRSGNYCL

SEQ ID NO: 19778 - protein, 11 aa, BK virus
LQQRSGNYCLE

SEQ ID NO: 19779 - protein, 11 aa, BK virus
VFLHHAHALFV

SEQ ID NO: 19780 - protein, 11 aa, BK virus
FLHHAHALFVT

SEQ ID NO: 19781 - protein, 11 aa, BK virus
LHHAHALFVTL

SEQ ID NO: 19782 - protein, 11 aa, BK virus
HHAHALFVTLH

SEQ ID NO: 19783 - protein, 11 aa, BK virus
HAHALFVTLHE

SEQ ID NO: 19784 - protein, 11 aa, BK virus
AHALFVTLHEG

SEQ ID NO: 19785 - protein, 11 aa, BK virus
PLFVQLQPPTS

SEQ ID NO: 19786 - protein, 11 aa, BK virus
LFVQLQPPTSV

SEQ ID NO: 19787 - protein, 11 aa, BK virus
FVQLQPPTSVD

SEQ ID NO: 19788 - protein, 11 aa, BK virus
VQLQPPTSVDF

SEQ ID NO: 19789 - protein, 11 aa, BK virus
QLQPPTSVDFH

SEQ ID NO: 19790 - protein, 11 aa, BK virus
LQPPTSVDFHR

SEQ ID NO: 19791 - protein, 11 aa, BK virus
QPPTSVDFHRL

SEQ ID NO: 19792 - protein, 11 aa, BK virus
PPTSVDFHRLG

SEQ ID NO: 19793 - protein, 11 aa, BK virus
PTSVDFHRLGP

SEQ ID NO: 19794 - protein, 11 aa, BK virus
TSVDFHRLGPH

SEQ ID NO: 19795 - protein, 11 aa, BK virus
SVDFHRLGPHL

SEQ ID NO: 19796 - protein, 11 aa, BK virus
VDFHRLGPHLN

SEQ ID NO: 19797 - protein, 11 aa, BK virus
DFHRLGPHLNW

SEQ ID NO: 19798 - protein, 11 aa, BK virus
FHRLGPHLNWG

SEQ ID NO: 19799 - protein, 11 aa, BK virus
HRLGPHLNWGG

SEQ ID NO: 19800 - protein, 11 aa, BK virus
RLGPHLNWGGE

SEQ ID NO: 19801 - protein, 11 aa, BK virus
LGPHLNWGGEF

SEQ ID NO: 19802 - protein, 11 aa, BK virus
GPHLNWGGEFL

SEQ ID NO: 19803 - protein, 11 aa, BK virus
PHLNWGGEFLL

SEQ ID NO: 19804 - protein, 11 aa, BK virus
HLNWGGEFLLC

SEQ ID NO: 19805 - protein, 11 aa, BK virus
LNWGGEFLLCC

SEQ ID NO: 19806 - protein, 11 aa, BK virus
NWGGEFLLCCN

SEQ ID NO: 19807 - protein, 11 aa, BK virus
WGGEFLLCCNR

SEQ ID NO: 19808 - protein, 11 aa, BK virus
GGEFLLCCNRE

SEQ ID NO: 19809 - protein, 11 aa, BK virus
GEFLLCCNREA

SEQ ID NO: 19810 - protein, 11 aa, BK virus
EFLLCCNREAF

SEQ ID NO: 19811 - protein, 11 aa, BK virus
FLLCCNREAFF

SEQ ID NO: 19812 - protein, 11 aa, BK virus
LLCCNREAFFS

SEQ ID NO: 19813 - protein, 11 aa, BK virus
LCCNREAFFSL

SEQ ID NO: 19814 - protein, 11 aa, BK virus
CCNREAFFSLG

SEQ ID NO: 19815 - protein, 11 aa, BK virus
CNREAFFSLGY

SEQ ID NO: 19816 - protein, 11 aa, BK virus
NREAFFSLGYH

SEQ ID NO: 19817 - protein, 11 aa, BK virus
REAFFSLGYHC

SEQ ID NO: 19818 - protein, 11 aa, BK virus
GFHLDPPFLGL

SEQ ID NO: 19819 - protein, 11 aa, BK virus
FHLDPPFLGLG

SEQ ID NO: 19820 - protein, 11 aa, BK virus
HLDPPFLGLGS

SEQ ID NO: 19821 - protein, 11 aa, BK virus
LDPPFLGLGSI

SEQ ID NO: 19822 - protein, 11 aa, BK virus
DPPFLGLGSIL

SEQ ID NO: 19823 - protein, 11 aa, BK virus
PPFLGLGSILP

SEQ ID NO: 19824 - protein, 11 aa, BK virus
PFLGLGSILPL

SEQ ID NO: 19825 - protein, 11 aa, BK virus
LLELLLLLLLV

SEQ ID NO: 19826 - protein, 11 aa, BK virus
LELLLLLLLVV

SEQ ID NO: 19827 - protein, 11 aa, BK virus
ELLLLLLLVVL

SEQ ID NO: 19828 - protein, 11 aa, BK virus
LLLLLLLVVLA

SEQ ID NO: 19829 - protein, 11 aa, BK virus
LLLLLLVVLAL

SEQ ID NO: 19830 - protein, 11 aa, BK virus
LLLLLVVLALA

SEQ ID NO: 19831 - protein, 11 aa, BK virus
LLLLVVLALAR

SEQ ID NO: 19832 - protein, 11 aa, BK virus
LLLVVLALARV

SEQ ID NO: 19833 - protein, 11 aa, BK virus
LLVVLALARVP

SEQ ID NO: 19834 - protein, 11 aa, BK virus
LVVLALARVPL

SEQ ID NO: 19835 - protein, 11 aa, BK virus
VVLALARVPLA

SEQ ID NO: 19836 - protein, 11 aa, BK virus
VLALARVPLAF

SEQ ID NO: 19837 - protein, 11 aa, BK virus
LALARVPLAFW

SEQ ID NO: 19838 - protein, 11 aa, BK virus
ALARVPLAFWE

SEQ ID NO: 19839 - protein, 11 aa, BK virus
LARVPLAFWEL

SEQ ID NO: 19840 - protein, 11 aa, BK virus
ARVPLAFWELP

SEQ ID NO: 19841 - protein, 11 aa, BK virus
RVPLAFWELPL

SEQ ID NO: 19842 - protein, 11 aa, BK virus
VPLAFWELPLD

SEQ ID NO: 19843 - protein, 11 aa, BK virus
PLAFWELPLDT

SEQ ID NO: 19844 - protein, 11 aa, BK virus
LAFWELPLDTL

SEQ ID NO: 19845 - protein, 11 aa, BK virus
AFWELPLDTLL

SEQ ID NO: 19846 - protein, 11 aa, BK virus
FWELPLDTLLF

SEQ ID NO: 19847 - protein, 11 aa, BK virus
WELPLDTLLFF

SEQ ID NO: 19848 - protein, 11 aa, BK virus
ELPLDTLLFFW

SEQ ID NO: 19849 - protein, 11 aa, BK virus
LPLDTLLFFWL

SEQ ID NO: 19850 - protein, 11 aa, BK virus
PLDTLLFFWLG

SEQ ID NO: 19851 - protein, 11 aa, BK virus
LDTLLFFWLGP

SEQ ID NO: 19852 - protein, 11 aa, BK virus
DTLLFFWLGPS

SEQ ID NO: 19853 - protein, 11 aa, BK virus
TLLFFWLGPSS

SEQ ID NO: 19854 - protein, 11 aa, BK virus
LLFFWLGPSSY

SEQ ID NO: 19855 - protein, 11 aa, BK virus
LFFWLGPSSYA

SEQ ID NO: 19856 - protein, 11 aa, BK virus
FFWLGPSSYAS

SEQ ID NO: 19857 - protein, 11 aa, BK virus
FWLGPSSYASR

SEQ ID NO: 19858 - protein, 11 aa, BK virus
WLGPSSYASRA

SEQ ID NO: 19859 - protein, 11 aa, BK virus
LGPSSYASRAG

SEQ ID NO: 19860 - protein, 11 aa, BK virus
GPSSYASRAGV

SEQ ID NO: 19861 - protein, 11 aa, BK virus
PSSYASRAGVT

SEQ ID NO: 19862 - protein, 11 aa, BK virus
SSYASRAGVTV

SEQ ID NO: 19863 - protein, 11 aa, BK virus
SYASRAGVTVP

SEQ ID NO: 19864 - protein, 11 aa, BK virus
YASRAGVTVPY

SEQ ID NO: 19865 - protein, 11 aa, BK virus
ASRAGVTVPYR

SEQ ID NO: 19866 - protein, 11 aa, BK virus
SRAGVTVPYRP

SEQ ID NO: 19867 - protein, 11 aa, BK virus
RAGVTVPYRPR

SEQ ID NO: 19868 - protein, 11 aa, BK virus
AGVTVPYRPRS

SEQ ID NO: 19869 - protein, 11 aa, BK virus
GVTVPYRPRSK

SEQ ID NO: 19870 - protein, 11 aa, BK virus
VTVPYRPRSKG

SEQ ID NO: 19871 - protein, 11 aa, BK virus
TVPYRPRSKGN

SEQ ID NO: 19872 - protein, 11 aa, BK virus
VPYRPRSKGNI

SEQ ID NO: 19873 - protein, 11 aa, BK virus
PYRPRSKGNIH

SEQ ID NO: 19874 - protein, 11 aa, BK virus
LAPPGAIVFSI

SEQ ID NO: 19875 - protein, 11 aa, BK virus
APPGAIVFSIN

SEQ ID NO: 19876 - protein, 11 aa, BK virus
PPGAIVFSINS

SEQ ID NO: 19877 - protein, 11 aa, BK virus
PGAIVFSINSP

SEQ ID NO: 19878 - protein, 11 aa, BK virus
GAIVFSINSPE

SEQ ID NO: 19879 - protein, 11 aa, BK virus
AIVFSINSPEC

SEQ ID NO: 19880 - protein, 11 aa, BK virus
IVFSINSPECT

SEQ ID NO: 19881 - protein, 11 aa, BK virus
VFSINSPECTL

SEQ ID NO: 19882 - protein, 11 aa, BK virus
FSINSPECTLC

SEQ ID NO: 19883 - protein, 11 aa, BK virus
FLKSILCVTSS

SEQ ID NO: 19884 - protein, 11 aa, BK virus
LKSILCVTSSI

SEQ ID NO: 19885 - protein, 11 aa, BK virus
KSILCVTSSIL

SEQ ID NO: 19886 - protein, 11 aa, BK virus
SILCVTSSILS

SEQ ID NO: 19887 - protein, 11 aa, BK virus
ILCVTSSILSA

SEQ ID NO: 19888 - protein, 11 aa, BK virus
LCVTSSILSAS

SEQ ID NO: 19889 - protein, 11 aa, BK virus
CVTSSILSASS

SEQ ID NO: 19890 - protein, 11 aa, BK virus
VTSSILSASSI

SEQ ID NO: 19891 - protein, 11 aa, BK virus
TSSILSASSIL

SEQ ID NO: 19892 - protein, 11 aa, BK virus
VWPKCTRVPSL

SEQ ID NO: 19893 - protein, 11 aa, BK virus
WPKCTRVPSLS

SEQ ID NO: 19894 - protein, 11 aa, BK virus
PKCTRVPSLSA

SEQ ID NO: 19895 - protein, 11 aa, BK virus
KCTRVPSLSAT

SEQ ID NO: 19896 - protein, 11 aa, BK virus
CTRVPSLSATC

SEQ ID NO: 19897 - protein, 11 aa, BK virus
TRVPSLSATCL

SEQ ID NO: 19898 - protein, 11 aa, BK virus
RVPSLSATCLT

SEQ ID NO: 19899 - protein, 11 aa, BK virus
VPSLSATCLTI

SEQ ID NO: 19900 - protein, 11 aa, BK virus
PSLSATCLTIE

SEQ ID NO: 19901 - protein, 11 aa, BK virus
SLSATCLTIEG

SEQ ID NO: 19902 - protein, 11 aa, BK virus
LSATCLTIEGL

SEQ ID NO: 19903 - protein, 11 aa, BK virus
SATCLTIEGLI

SEQ ID NO: 19904 - protein, 11 aa, BK virus
ATCLTIEGLIG

SEQ ID NO: 19905 - protein, 11 aa, BK virus
TCLTIEGLIGE

SEQ ID NO: 19906 - protein, 11 aa, BK virus
CLTIEGLIGER

SEQ ID NO: 19907 - protein, 11 aa, BK virus
LTIEGLIGERS

SEQ ID NO: 19908 - protein, 11 aa, BK virus
TIEGLIGERSE

SEQ ID NO: 19909 - protein, 11 aa, BK virus
KFIGAFTIVQV

SEQ ID NO: 19910 - protein, 11 aa, BK virus
FIGAFTIVQVV

SEQ ID NO: 19911 - protein, 11 aa, BK virus
IGAFTIVQVVS

SEQ ID NO: 19912 - protein, 11 aa, BK virus
GAFTIVQVVSS

SEQ ID NO: 19913 - protein, 11 aa, BK virus
AFTIVQVVSSK

SEQ ID NO: 19914 - protein, 11 aa, BK virus
FTIVQVVSSKN

SEQ ID NO: 19915 - protein, 11 aa, BK virus
TIVQVVSSKNL

SEQ ID NO: 19916 - protein, 11 aa, BK virus
IVQVVSSKNLA

SEQ ID NO: 19917 - protein, 11 aa, BK virus
VQVVSSKNLAK

SEQ ID NO: 19918 - protein, 11 aa, BK virus
QVVSSKNLAKE

SEQ ID NO: 19919 - protein, 11 aa, BK virus
VVSSKNLAKES

SEQ ID NO: 19920 - protein, 11 aa, BK virus
VSSKNLAKESL

SEQ ID NO: 19921 - protein, 11 aa, BK virus
SSKNLAKESLK

SEQ ID NO: 19922 - protein, 11 aa, BK virus
SKNLAKESLKN

SEQ ID NO: 19923 - protein, 11 aa, BK virus
KNLAKESLKNL

SEQ ID NO: 19924 - protein, 11 aa, BK virus
NLAKESLKNLS

SEQ ID NO: 19925 - protein, 11 aa, BK virus
LAKESLKNLSV

SEQ ID NO: 19926 - protein, 11 aa, BK virus
AKESLKNLSVL

SEQ ID NO: 19927 - protein, 11 aa, BK virus
KESLKNLSVLL

SEQ ID NO: 19928 - protein, 11 aa, BK virus
ESLKNLSVLLC

SEQ ID NO: 19929 - protein, 11 aa, BK virus
SLKNLSVLLCN

SEQ ID NO: 19930 - protein, 11 aa, BK virus
LKNLSVLLCNS

SEQ ID NO: 19931 - protein, 11 aa, BK virus
KNLSVLLCNSC

SEQ ID NO: 19932 - protein, 11 aa, BK virus
NLSVLLCNSCE

SEQ ID NO: 19933 - protein, 11 aa, BK virus
LSVLLCNSCEV

SEQ ID NO: 19934 - protein, 11 aa, BK virus
SVLLCNSCEVI

SEQ ID NO: 19935 - protein, 11 aa, BK virus
VLLCNSCEVIE

SEQ ID NO: 19936 - protein, 11 aa, BK virus
LLCNSCEVIEG

SEQ ID NO: 19937 - protein, 11 aa, BK virus
LCNSCEVIEGI

SEQ ID NO: 19938 - protein, 11 aa, BK virus
CNSCEVIEGIS

SEQ ID NO: 19939 - protein, 11 aa, BK virus
NSCEVIEGISS

SEQ ID NO: 19940 - protein, 11 aa, BK virus
SCEVIEGISSL

SEQ ID NO: 19941 - protein, 11 aa, BK virus
CEVIEGISSLI

SEQ ID NO: 19942 - protein, 11 aa, BK virus
EVIEGISSLIT

SEQ ID NO: 19943 - protein, 11 aa, BK virus
VIEGISSLITC

SEQ ID NO: 19944 - protein, 11 aa, BK virus
IEGISSLITCH

SEQ ID NO: 19945 - protein, 11 aa, BK virus
EGISSLITCHK

SEQ ID NO: 19946 - protein, 11 aa, BK virus
GISSLITCHKA

SEQ ID NO: 19947 - protein, 11 aa, BK virus
ISSLITCHKAW

SEQ ID NO: 19948 - protein, 11 aa, BK virus
SSLITCHKAWE

SEQ ID NO: 19949 - protein, 11 aa, BK virus
SLITCHKAWEI

SEQ ID NO: 19950 - protein, 11 aa, BK virus
LITCHKAWEIV

SEQ ID NO: 19951 - protein, 11 aa, BK virus
ITCHKAWEIVA

SEQ ID NO: 19952 - protein, 11 aa, BK virus
TCHKAWEIVAN

SEQ ID NO: 19953 - protein, 11 aa, BK virus
CHKAWEIVANK

SEQ ID NO: 19954 - protein, 11 aa, BK virus
HKAWEIVANKE

SEQ ID NO: 19955 - protein, 11 aa, BK virus
KAWEIVANKEG

SEQ ID NO: 19956 - protein, 11 aa, BK virus
AWEIVANKEGP

SEQ ID NO: 19957 - protein, 11 aa, BK virus
WEIVANKEGPQ

SEQ ID NO: 19958 - protein, 11 aa, BK virus
EIVANKEGPQC

SEQ ID NO: 19959 - protein, 11 aa, BK virus
IVANKEGPQCL

SEQ ID NO: 19960 - protein, 11 aa, BK virus
VANKEGPQCLG

SEQ ID NO: 19961 - protein, 11 aa, BK virus
ANKEGPQCLGS

SEQ ID NO: 19962 - protein, 11 aa, BK virus
NKEGPQCLGSR

SEQ ID NO: 19963 - protein, 11 aa, BK virus
KEGPQCLGSRY

SEQ ID NO: 19964 - protein, 11 aa, BK virus
ILLTKVFTPGN

SEQ ID NO: 19965 - protein, 11 aa, BK virus
LLTKVFTPGNR

SEQ ID NO: 19966 - protein, 11 aa, BK virus
LTKVFTPGNRI

SEQ ID NO: 19967 - protein, 11 aa, BK virus
TKVFTPGNRIS

SEQ ID NO: 19968 - protein, 11 aa, BK virus
YSSGLNNSKAM

SEQ ID NO: 19969 - protein, 11 aa, BK virus
SSGLNNSKAMP

SEQ ID NO: 19970 - protein, 11 aa, BK virus
SGLNNSKAMPD

SEQ ID NO: 19971 - protein, 11 aa, BK virus
GLNNSKAMPDC

SEQ ID NO: 19972 - protein, 11 aa, BK virus
IKAANPAIAPG

SEQ ID NO: 19973 - protein, 11 aa, BK virus
KAANPAIAPGA

SEQ ID NO: 19974 - protein, 11 aa, BK virus
AANPAIAPGAP

SEQ ID NO: 19975 - protein, 11 aa, BK virus
ANPAIAPGAPA

SEQ ID NO: 19976 - protein, 11 aa, BK virus
NPAIAPGAPAI

SEQ ID NO: 19977 - protein, 11 aa, BK virus
PAIAPGAPAIT

SEQ ID NO: 19978 - protein, 11 aa, BK virus
AIAPGAPAITA

SEQ ID NO: 19979 - protein, 11 aa, BK virus
IAPGAPAITAY

SEQ ID NO: 19980 - protein, 11 aa, BK virus
APGAPAITAYV

SEQ ID NO: 19981 - protein, 11 aa, BK virus
GVRPIAAIASE

SEQ ID NO: 19982 - protein, 11 aa, BK virus
VRPIAAIASEV

SEQ ID NO: 19983 - protein, 11 aa, BK virus
RPIAAIASEVL

SEQ ID NO: 19984 - protein, 11 aa, BK virus
PIAAIASEVLV

SEQ ID NO: 19985 - protein, 11 aa, BK virus
IAAIASEVLVM

SEQ ID NO: 19986 - protein, 11 aa, BK virus
AAIASEVLVMP

SEQ ID NO: 19987 - protein, 11 aa, BK virus
AIASEVLVMPS

SEQ ID NO: 19988 - protein, 11 aa, BK virus
IASEVLVMPST

SEQ ID NO: 19989 - protein, 11 aa, BK virus
ASEVLVMPSTV

SEQ ID NO: 19990 - protein, 11 aa, BK virus
SEVLVMPSTVA

SEQ ID NO: 19991 - protein, 11 aa, BK virus
EVLVMPSTVAR

SEQ ID NO: 19992 - protein, 11 aa, BK virus
VLVMPSTVARD

SEQ ID NO: 19993 - protein, 11 aa, BK virus
LVMPSTVARDA

SEQ ID NO: 19994 - protein, 11 aa, BK virus
VMPSTVARDAI

SEQ ID NO: 19995 - protein, 11 aa, BK virus
TSIAAAASPAA

SEQ ID NO: 19996 - protein, 11 aa, BK virus
SIAAAASPAAI

SEQ ID NO: 19997 - protein, 11 aa, BK virus
IAAAASPAAIS

SEQ ID NO: 19998 - protein, 11 aa, BK virus
AAAASPAAISA

SEQ ID NO: 19999 - protein, 11 aa, BK virus
AAASPAAISAT

SEQ ID NO: 20000 - protein, 11 aa, BK virus
AASPAAISATE

SEQ ID NO: 20001 - protein, 11 aa, BK virus
ASPAAISATEN

SEQ ID NO: 20002 - protein, 11 aa, BK virus
SPAAISATENP

SEQ ID NO: 20003 - protein, 11 aa, BK virus
PAAISATENPV

SEQ ID NO: 20004 - protein, 11 aa, BK virus
AAISATENPVA

SEQ ID NO: 20005 - protein, 11 aa, BK virus
AISATENPVAA

SEQ ID NO: 20006 - protein, 11 aa, BK virus
ISATENPVAAA

SEQ ID NO: 20007 - protein, 11 aa, BK virus
SATENPVAAAA

SEQ ID NO: 20008 - protein, 11 aa, BK virus
ATENPVAAAAS

SEQ ID NO: 20009 - protein, 11 aa, BK virus
TENPVAAAASD

SEQ ID NO: 20010 - protein, 11 aa, BK virus
ENPVAAAASDT

SEQ ID NO: 20011 - protein, 11 aa, BK virus
NPVAAAASDTL

SEQ ID NO: 20012 - protein, 11 aa, BK virus
PVAAAASDTLA

SEQ ID NO: 20013 - protein, 11 aa, BK virus
VAAAASDTLAT

SEQ ID NO: 20014 - protein, 11 aa, BK virus
AAAASDTLATR

SEQ ID NO: 20015 - protein, 11 aa, BK virus
AAASDTLATRS

SEQ ID NO: 20016 - protein, 11 aa, BK virus
AASDTLATRSP

SEQ ID NO: 20017 - protein, 11 aa, BK virus
ASDTLATRSPK

SEQ ID NO: 20018 - protein, 11 aa, BK virus
SDTLATRSPKS

SEQ ID NO: 20019 - protein, 11 aa, BK virus
DTLATRSPKSA

SEQ ID NO: 20020 - protein, 11 aa, BK virus
TLATRSPKSAR

SEQ ID NO: 20021 - protein, 11 aa, BK virus
LATRSPKSARA

SEQ ID NO: 20022 - protein, 11 aa, BK virus
ATRSPKSARAA

SEQ ID NO: 20023 - protein, 11 aa, BK virus
TRSPKSARAAP

SEQ ID NO: 20024 - protein, 11 aa, BK virus
RSPKSARAAPM

SEQ ID NO: 20025 - protein, 11 aa, BK virus
SPKSARAAPMN

SEQ ID NO: 20026 - protein, 11 aa, BK virus
PKSARAAPMNL

SEQ ID NO: 20027 - protein, 11 aa, BK virus
KSARAAPMNLE

SEQ ID NO: 20028 - protein, 11 aa, BK virus
SARAAPMNLEI

SEQ ID NO: 20029 - protein, 11 aa, BK virus
ARAAPMNLEIQ

SEQ ID NO: 20030 - protein, 11 aa, BK virus
RAAPMNLEIQK

SEQ ID NO: 20031 - protein, 11 aa, BK virus
AAPMNLEIQKK

SEQ ID NO: 20032 - protein, 11 aa, BK virus
APMNLEIQKKR

SEQ ID NO: 20033 - protein, 11 aa, BK virus
PMNLEIQKKRD

SEQ ID NO: 20034 - protein, 11 aa, BK virus
MNLEIQKKRDY

SEQ ID NO: 20035 - protein, 11 aa, BK virus
NLEIQKKRDYL

SEQ ID NO: 20036 - protein, 11 aa, BK virus
LEIQKKRDYLP

SEQ ID NO: 20037 - protein, 11 aa, BK virus
EIQKKRDYLPR

SEQ ID NO: 20038 - protein, 11 aa, BK virus
IQKKRDYLPRS

SEQ ID NO: 20039 - protein, 11 aa, BK virus
QKKRDYLPRSL

SEQ ID NO: 20040 - protein, 11 aa, BK virus
KKRDYLPRSLL

SEQ ID NO: 20041 - protein, 11 aa, BK virus
KRDYLPRSLLQ

SEQ ID NO: 20042 - protein, 11 aa, BK virus
RDYLPRSLLQS

SEQ ID NO: 20043 - protein, 11 aa, BK virus
DYLPRSLLQSL

SEQ ID NO: 20044 - protein, 11 aa, BK virus
YLPRSLLQSLL

SEQ ID NO: 20045 - protein, 11 aa, BK virus
LPRSLLQSLLQ

SEQ ID NO: 20046 - protein, 11 aa, BK virus
PRSLLQSLLQQ

SEQ ID NO: 20047 - protein, 11 aa, BK virus
RSLLQSLLQQV

SEQ ID NO: 20048 - protein, 11 aa, BK virus
SLLQSLLQQVK

SEQ ID NO: 20049 - protein, 11 aa, BK virus
LLQSLLQQVKQ

SEQ ID NO: 20050 - protein, 11 aa, BK virus
LQSLLQQVKQW

SEQ ID NO: 20051 - protein, 11 aa, BK virus
QSLLQQVKQWY

SEQ ID NO: 20052 - protein, 11 aa, BK virus
SLLQQVKQWYF

SEQ ID NO: 20053 - protein, 11 aa, BK virus
LLQQVKQWYFC

SEQ ID NO: 20054 - protein, 11 aa, BK virus
LQQVKQWYFCF

SEQ ID NO: 20055 - protein, 11 aa, BK virus
QQVKQWYFCFS

SEQ ID NO: 20056 - protein, 11 aa, BK virus
QVKQWYFCFSR

SEQ ID NO: 20057 - protein, 11 aa, BK virus
VKQWYFCFSRL

SEQ ID NO: 20058 - protein, 11 aa, BK virus
KQWYFCFSRLH

SEQ ID NO: 20059 - protein, 11 aa, BK virus
QWYFCFSRLHC

SEQ ID NO: 20060 - protein, 11 aa, BK virus
WYFCFSRLHCL

SEQ ID NO: 20061 - protein, 11 aa, BK virus
YFCFSRLHCLH

SEQ ID NO: 20062 - protein, 11 aa, BK virus
FCFSRLHCLHL

SEQ ID NO: 20063 - protein, 11 aa, BK virus
CFSRLHCLHLY

SEQ ID NO: 20064 - protein, 11 aa, BK virus
FSRLHCLHLYK

SEQ ID NO: 20065 - protein, 11 aa, BK virus
SRLHCLHLYKI

SEQ ID NO: 20066 - protein, 11 aa, BK virus
RLHCLHLYKIP

SEQ ID NO: 20067 - protein, 11 aa, BK virus
LHCLHLYKIPA

SEQ ID NO: 20068 - protein, 11 aa, BK virus
HCLHLYKIPAK

SEQ ID NO: 20069 - protein, 11 aa, BK virus
CLHLYKIPAKA

SEQ ID NO: 20070 - protein, 11 aa, BK virus
LHLYKIPAKAL

SEQ ID NO: 20071 - protein, 11 aa, BK virus
HLYKIPAKALK

SEQ ID NO: 20072 - protein, 11 aa, BK virus
KSSELFFLFQS

SEQ ID NO: 20073 - protein, 11 aa, BK virus
SSELFFLFQSR

SEQ ID NO: 20074 - protein, 11 aa, BK virus
SELFFLFQSRF

SEQ ID NO: 20075 - protein, 11 aa, BK virus
ELFFLFQSRFY

SEQ ID NO: 20076 - protein, 11 aa, BK virus
LFFLFQSRFYQ

SEQ ID NO: 20077 - protein, 11 aa, BK virus
FFLFQSRFYQL

SEQ ID NO: 20078 - protein, 11 aa, BK virus
FLFQSRFYQLS

SEQ ID NO: 20079 - protein, 11 aa, BK virus
LFQSRFYQLSL

SEQ ID NO: 20080 - protein, 11 aa, BK virus
FQSRFYQLSLK

SEQ ID NO: 20081 - protein, 11 aa, BK virus
QSRFYQLSLKL

SEQ ID NO: 20082 - protein, 11 aa, BK virus
SRFYQLSLKLV

SEQ ID NO: 20083 - protein, 11 aa, BK virus
RFYQLSLKLVV

SEQ ID NO: 20084 - protein, 11 aa, BK virus
FYQLSLKLVVT

SEQ ID NO: 20085 - protein, 11 aa, BK virus
YQLSLKLVVTA

SEQ ID NO: 20086 - protein, 11 aa, BK virus
QLSLKLVVTAG

SEQ ID NO: 20087 - protein, 11 aa, BK virus
LSLKLVVTAGA

SEQ ID NO: 20088 - protein, 11 aa, BK virus
SLKLVVTAGAE

SEQ ID NO: 20089 - protein, 11 aa, BK virus
LKLVVTAGAEP

SEQ ID NO: 20090 - protein, 11 aa, BK virus
KLVVTAGAEPW

SEQ ID NO: 20091 - protein, 11 aa, BK virus
LVVTAGAEPWP

SEQ ID NO: 20092 - protein, 11 aa, BK virus
VVTAGAEPWPL

SEQ ID NO: 20093 - protein, 11 aa, BK virus
VTAGAEPWPLS

SEQ ID NO: 20094 - protein, 11 aa, BK virus
TAGAEPWPLSS

SEQ ID NO: 20095 - protein, 11 aa, BK virus
AGAEPWPLSSL

SEQ ID NO: 20096 - protein, 11 aa, BK virus
GAEPWPLSSLT

SEQ ID NO: 20097 - protein, 11 aa, BK virus
AEPWPLSSLTG

SEQ ID NO: 20098 - protein, 11 aa, BK virus
EPWPLSSLTGD

SEQ ID NO: 20099 - protein, 11 aa, BK virus
PWPLSSLTGDK

SEQ ID NO: 20100 - protein, 11 aa, BK virus
WPLSSLTGDKA

SEQ ID NO: 20101 - protein, 11 aa, BK virus
PLSSLTGDKAK

SEQ ID NO: 20102 - protein, 11 aa, BK virus
LSSLTGDKAKI

SEQ ID NO: 20103 - protein, 11 aa, BK virus
SSLTGDKAKIP

SEQ ID NO: 20104 - protein, 11 aa, BK virus
SLTGDKAKIPR

SEQ ID NO: 20105 - protein, 11 aa, BK virus
LTGDKAKIPRL

SEQ ID NO: 20106 - protein, 11 aa, BK virus
TGDKAKIPRLA

SEQ ID NO: 20107 - protein, 11 aa, BK virus
GDKAKIPRLAK

SEQ ID NO: 20108 - protein, 11 aa, BK virus
DKAKIPRLAKH

SEQ ID NO: 20109 - protein, 11 aa, BK virus
KAKIPRLAKHV

SEQ ID NO: 20110 - protein, 11 aa, BK virus
AKIPRLAKHVC

SEQ ID NO: 20111 - protein, 11 aa, BK virus
KIPRLAKHVCH

SEQ ID NO: 20112 - protein, 11 aa, BK virus
IPRLAKHVCHA

SEQ ID NO: 20113 - protein, 11 aa, BK virus
PRLAKHVCHAL

SEQ ID NO: 20114 - protein, 11 aa, BK virus
RLAKHVCHALS

SEQ ID NO: 20115 - protein, 11 aa, BK virus
LAKHVCHALSF

SEQ ID NO: 20116 - protein, 11 aa, BK virus
AKHVCHALSFL

SEQ ID NO: 20117 - protein, 11 aa, BK virus
KHVCHALSFLR

SEQ ID NO: 20118 - protein, 11 aa, BK virus
HVCHALSFLRS

SEQ ID NO: 20119 - protein, 11 aa, BK virus
VCHALSFLRSW

SEQ ID NO: 20120 - protein, 11 aa, BK virus
CHALSFLRSWF

SEQ ID NO: 20121 - protein, 11 aa, BK virus
HALSFLRSWFG

SEQ ID NO: 20122 - protein, 11 aa, BK virus
ALSFLRSWFGC

SEQ ID NO: 20123 - protein, 11 aa, BK virus
LSFLRSWFGCI

SEQ ID NO: 20124 - protein, 11 aa, BK virus
SFLRSWFGCIP

SEQ ID NO: 20125 - protein, 11 aa, BK virus
FLRSWFGCIPW

SEQ ID NO: 20126 - protein, 11 aa, BK virus
LRSWFGCIPWV

SEQ ID NO: 20127 - protein, 11 aa, BK virus
RSWFGCIPWVS

SEQ ID NO: 20128 - protein, 11 aa, BK virus
SWFGCIPWVSS

SEQ ID NO: 20129 - protein, 11 aa, BK virus
WFGCIPWVSSS

SEQ ID NO: 20130 - protein, 11 aa, BK virus
FGCIPWVSSSS

SEQ ID NO: 20131 - protein, 11 aa, BK virus
GCIPWVSSSSL

SEQ ID NO: 20132 - protein, 11 aa, BK virus
GHGLAAFPCES

SEQ ID NO: 20133 - protein, 11 aa, BK virus
HGLAAFPCESC

SEQ ID NO: 20134 - protein, 11 aa, BK virus
GLAAFPCESCT

SEQ ID NO: 20135 - protein, 11 aa, BK virus
LAAFPCESCTF

SEQ ID NO: 20136 - protein, 11 aa, BK virus
AAFPCESCTFL

SEQ ID NO: 20137 - protein, 11 aa, BK virus
AFPCESCTFLP

SEQ ID NO: 20138 - protein, 11 aa, BK virus
FPCESCTFLPE

SEQ ID NO: 20139 - protein, 11 aa, BK virus
PCESCTFLPEV

SEQ ID NO: 20140 - protein, 11 aa, BK virus
CESCTFLPEVM

SEQ ID NO: 20141 - protein, 11 aa, BK virus
ESCTFLPEVMV

SEQ ID NO: 20142 - protein, 11 aa, BK virus
SCTFLPEVMVW

SEQ ID NO: 20143 - protein, 11 aa, BK virus
CTFLPEVMVWL

SEQ ID NO: 20144 - protein, 11 aa, BK virus
TFLPEVMVWLH

SEQ ID NO: 20145 - protein, 11 aa, BK virus
FLPEVMVWLHS

SEQ ID NO: 20146 - protein, 11 aa, BK virus
LPEVMVWLHSM

SEQ ID NO: 20147 - protein, 11 aa, BK virus
PEVMVWLHSMG

SEQ ID NO: 20148 - protein, 11 aa, BK virus
EVMVWLHSMGK

SEQ ID NO: 20149 - protein, 11 aa, BK virus
VMVWLHSMGKQ

SEQ ID NO: 20150 - protein, 11 aa, BK virus
MVWLHSMGKQL

SEQ ID NO: 20151 - protein, 11 aa, BK virus
VWLHSMGKQLL

SEQ ID NO: 20152 - protein, 11 aa, BK virus
WLHSMGKQLLP

SEQ ID NO: 20153 - protein, 11 aa, BK virus
LHSMGKQLLPV

SEQ ID NO: 20154 - protein, 11 aa, BK virus
HSMGKQLLPVA

SEQ ID NO: 20155 - protein, 11 aa, BK virus
SMGKQLLPVAF

SEQ ID NO: 20156 - protein, 11 aa, BK virus
MGKQLLPVAFF

SEQ ID NO: 20157 - protein, 11 aa, BK virus
GKQLLPVAFFF

SEQ ID NO: 20158 - protein, 11 aa, BK virus
KQLLPVAFFFI

SEQ ID NO: 20159 - protein, 11 aa, BK virus
QLLPVAFFFII

SEQ ID NO: 20160 - protein, 11 aa, BK virus
LLPVAFFFIIY

SEQ ID NO: 20161 - protein, 11 aa, BK virus
LPVAFFFIIYK

SEQ ID NO: 20162 - protein, 11 aa, BK virus
PVAFFFIIYKR

SEQ ID NO: 20163 - protein, 11 aa, BK virus
VAFFFIIYKRP

SEQ ID NO: 20164 - protein, 11 aa, BK virus
AFFFIIYKRPR

SEQ ID NO: 20165 - protein, 11 aa, BK virus
FFFIIYKRPRP

SEQ ID NO: 20166 - protein, 11 aa, BK virus
FFIIYKRPRPP

SEQ ID NO: 20167 - protein, 11 aa, BK virus
FIIYKRPRPPL

SEQ ID NO: 20168 - protein, 11 aa, BK virus
IIYKRPRPPLP

SEQ ID NO: 20169 - protein, 11 aa, BK virus
IYKRPRPPLPP

SEQ ID NO: 20170 - protein, 11 aa, BK virus
YKRPRPPLPPP

SEQ ID NO: 20171 - protein, 11 aa, BK virus
KRPRPPLPPPF

SEQ ID NO: 20172 - protein, 11 aa, BK virus
RPRPPLPPPFL

SEQ ID NO: 20173 - protein, 11 aa, BK virus
PRPPLPPPFLS

SEQ ID NO: 20174 - protein, 11 aa, BK virus
RPPLPPPFLSS

SEQ ID NO: 20175 - protein, 11 aa, BK virus
PPLPPPFLSSS

SEQ ID NO: 20176 - protein, 11 aa, BK virus
PLPPPFLSSSK

SEQ ID NO: 20177 - protein, 11 aa, BK virus
LPPPFLSSSKG

SEQ ID NO: 20178 - protein, 11 aa, BK virus
PPPFLSSSKGV

SEQ ID NO: 20179 - protein, 11 aa, BK virus
PPFLSSSKGVE

SEQ ID NO: 20180 - protein, 11 aa, BK virus
PFLSSSKGVEA

SEQ ID NO: 20181 - protein, 11 aa, BK virus
FLSSSKGVEAF

SEQ ID NO: 20182 - protein, 11 aa, BK virus
LSSSKGVEAFS

SEQ ID NO: 20183 - protein, 11 aa, BK virus
SSSKGVEAFSE

SEQ ID NO: 20184 - protein, 11 aa, BK virus
SSKGVEAFSEA

SEQ ID NO: 20185 - protein, 11 aa, BK virus
QNYLGKSLFFC

SEQ ID NO: 20186 - protein, 11 aa, BK virus
NYLGKSLFFCN

SEQ ID NO: 20187 - protein, 11 aa, BK virus
YLGKSLFFCNF

SEQ ID NO: 20188 - protein, 11 aa, BK virus
LGKSLFFCNFC

SEQ ID NO: 20189 - protein, 11 aa, BK virus
GKSLFFCNFCK

SEQ ID NO: 20190 - protein, 8 aa, BK virus
QGRIHGAH

SEQ ID NO: 20191 - protein, 8 aa, BK virus
GRIHGAHG

SEQ ID NO: 20192 - protein, 8 aa, BK virus
RIHGAHGP

SEQ ID NO: 20193 - protein, 8 aa, BK virus
IHGAHGPF

SEQ ID NO: 20194 - protein, 8 aa, BK virus
HGAHGPFR

SEQ ID NO: 20195 - protein, 8 aa, BK virus
GAHGPFRP

SEQ ID NO: 20196 - protein, 8 aa, BK virus
KSCLGKSS

SEQ ID NO: 20197 - protein, 8 aa, BK virus
SCLGKSSL

SEQ ID NO: 20198 - protein, 8 aa, BK virus
CLGKSSLN

SEQ ID NO: 20199 - protein, 8 aa, BK virus
LGKSSLNE

SEQ ID NO: 20200 - protein, 8 aa, BK virus
GKSSLNEK

SEQ ID NO: 20201 - protein, 8 aa, BK virus
KSSLNEKS

SEQ ID NO: 20202 - protein, 8 aa, BK virus
SSLNEKSL

SEQ ID NO: 20203 - protein, 8 aa, BK virus
SLNEKSLF

SEQ ID NO: 20204 - protein, 8 aa, BK virus
LNEKSLFK

SEQ ID NO: 20205 - protein, 8 aa, BK virus
NEKSLFKE

SEQ ID NO: 20206 - protein, 8 aa, BK virus
EKSLFKEV

SEQ ID NO: 20207 - protein, 8 aa, BK virus
NEENEYFV

SEQ ID NO: 20208 - protein, 8 aa, BK virus
KNGAGCKG

SEQ ID NO: 20209 - protein, 8 aa, BK virus
NGAGCKGS

SEQ ID NO: 20210 - protein, 8 aa, BK virus
GAGCKGSS

SEQ ID NO: 20211 - protein, 8 aa, BK virus
AGCKGSSS

SEQ ID NO: 20212 - protein, 8 aa, BK virus
GCKGSSSA

SEQ ID NO: 20213 - protein, 8 aa, BK virus
FSSLPRYP

SEQ ID NO: 20214 - protein, 8 aa, BK virus
SSLPRYPV

SEQ ID NO: 20215 - protein, 8 aa, BK virus
SLPRYPVL

SEQ ID NO: 20216 - protein, 8 aa, BK virus
LPRYPVLQ

SEQ ID NO: 20217 - protein, 8 aa, BK virus
PRYPVLQG

SEQ ID NO: 20218 - protein, 8 aa, BK virus
RYPVLQGM

SEQ ID NO: 20219 - protein, 8 aa, BK virus
YPVLQGMA

SEQ ID NO: 20220 - protein, 8 aa, BK virus
PVLQGMAY

SEQ ID NO: 20221 - protein, 8 aa, BK virus
VLQGMAYL

SEQ ID NO: 20222 - protein, 8 aa, BK virus
LQGMAYLF

SEQ ID NO: 20223 - protein, 8 aa, BK virus
QGMAYLFQ

SEQ ID NO: 20224 - protein, 8 aa, BK virus
GMAYLFQK

SEQ ID NO: 20225 - protein, 8 aa, BK virus
MAYLFQKA

SEQ ID NO: 20226 - protein, 8 aa, BK virus
AYLFQKAF

SEQ ID NO: 20227 - protein, 8 aa, BK virus
YLFQKAFC

SEQ ID NO: 20228 - protein, 8 aa, BK virus
LFQKAFCA

SEQ ID NO: 20229 - protein, 8 aa, BK virus
FQKAFCAL

SEQ ID NO: 20230 - protein, 8 aa, BK virus
QKAFCALP

SEQ ID NO: 20231 - protein, 8 aa, BK virus
KAFCALPL

SEQ ID NO: 20232 - protein, 8 aa, BK virus
AFCALPLH

SEQ ID NO: 20233 - protein, 8 aa, BK virus
FCALPLHA

SEQ ID NO: 20234 - protein, 8 aa, BK virus
CALPLHAM

SEQ ID NO: 20235 - protein, 8 aa, BK virus
ALPLHAMS

SEQ ID NO: 20236 - protein, 8 aa, BK virus
LPLHAMSA

SEQ ID NO: 20237 - protein, 8 aa, BK virus
KIFKKRAL

SEQ ID NO: 20238 - protein, 8 aa, BK virus
IFKKRALG

SEQ ID NO: 20239 - protein, 8 aa, BK virus
FKKRALGL

SEQ ID NO: 20240 - protein, 8 aa, BK virus
KKRALGLD

SEQ ID NO: 20241 - protein, 8 aa, BK virus
KRALGLDR

SEQ ID NO: 20242 - protein, 8 aa, BK virus
RALGLDRL

SEQ ID NO: 20243 - protein, 8 aa, BK virus
ALGLDRLL

SEQ ID NO: 20244 - protein, 8 aa, BK virus
LGLDRLLL

SEQ ID NO: 20245 - protein, 8 aa, BK virus
GLDRLLLH

SEQ ID NO: 20246 - protein, 8 aa, BK virus
LLHTVVWL

SEQ ID NO: 20247 - protein, 8 aa, BK virus
LHTVVWLR

SEQ ID NO: 20248 - protein, 8 aa, BK virus
HTVVWLRP

SEQ ID NO: 20249 - protein, 8 aa, BK virus
TVVWLRPN

SEQ ID NO: 20250 - protein, 8 aa, BK virus
RNSAMVGP

SEQ ID NO: 20251 - protein, 8 aa, BK virus
NSAMVGPN

SEQ ID NO: 20252 - protein, 8 aa, BK virus
SAMVGPNN

SEQ ID NO: 20253 - protein, 8 aa, BK virus
AMVGPNNW

SEQ ID NO: 20254 - protein, 8 aa, BK virus
MVGPNNWR

SEQ ID NO: 20255 - protein, 8 aa, BK virus
VGPNNWRN

SEQ ID NO: 20256 - protein, 8 aa, BK virus
GPNNWRNS

SEQ ID NO: 20257 - protein, 8 aa, BK virus
PNNWRNSL

SEQ ID NO: 20258 - protein, 8 aa, BK virus
NNWRNSLQ

SEQ ID NO: 20259 - protein, 8 aa, BK virus
NWRNSLQR

SEQ ID NO: 20260 - protein, 8 aa, BK virus
WRNSLQRS

SEQ ID NO: 20261 - protein, 8 aa, BK virus
RNSLQRSK

SEQ ID NO: 20262 - protein, 8 aa, BK virus
NSLQRSKA

SEQ ID NO: 20263 - protein, 8 aa, BK virus
SLQRSKAL

SEQ ID NO: 20264 - protein, 8 aa, BK virus
LQRSKALR

SEQ ID NO: 20265 - protein, 8 aa, BK virus
INNKILKG

SEQ ID NO: 20266 - protein, 8 aa, BK virus
NNKILKGP

SEQ ID NO: 20267 - protein, 8 aa, BK virus
NKILKGPK

SEQ ID NO: 20268 - protein, 8 aa, BK virus
VPTYGTEE

SEQ ID NO: 20269 - protein, 8 aa, BK virus
PTYGTEEW

SEQ ID NO: 20270 - protein, 8 aa, BK virus
TYGTEEWE

SEQ ID NO: 20271 - protein, 8 aa, BK virus
YGTEEWES

SEQ ID NO: 20272 - protein, 8 aa, BK virus
GTEEWESW

SEQ ID NO: 20273 - protein, 8 aa, BK virus
TEEWESWW

SEQ ID NO: 20274 - protein, 8 aa, BK virus
EEWESWWS

SEQ ID NO: 20275 - protein, 8 aa, BK virus
EWESWWSS

SEQ ID NO: 20276 - protein, 8 aa, BK virus
WESWWSSF

SEQ ID NO: 20277 - protein, 8 aa, BK virus
ESWWSSFN

SEQ ID NO: 20278 - protein, 8 aa, BK virus
SWWSSFNE

SEQ ID NO: 20279 - protein, 8 aa, BK virus
WWSSFNEK

SEQ ID NO: 20280 - protein, 8 aa, BK virus
WSSFNEKW

SEQ ID NO: 20281 - protein, 8 aa, BK virus
SSFNEKWD

SEQ ID NO: 20282 - protein, 8 aa, BK virus
SFNEKWDE

SEQ ID NO: 20283 - protein, 8 aa, BK virus
FNEKWDED

SEQ ID NO: 20284 - protein, 8 aa, BK virus
NEKWDEDL

SEQ ID NO: 20285 - protein, 8 aa, BK virus
EKWDEDLF

SEQ ID NO: 20286 - protein, 8 aa, BK virus
KWDEDLFC

SEQ ID NO: 20287 - protein, 8 aa, BK virus
WDEDLFCH

SEQ ID NO: 20288 - protein, 8 aa, BK virus
DEDLFCHE

SEQ ID NO: 20289 - protein, 8 aa, BK virus
EDLFCHED

SEQ ID NO: 20290 - protein, 8 aa, BK virus
DLFCHEDM

SEQ ID NO: 20291 - protein, 8 aa, BK virus
LFCHEDMF

SEQ ID NO: 20292 - protein, 8 aa, BK virus
FCHEDMFA

SEQ ID NO: 20293 - protein, 8 aa, BK virus
CHEDMFAS

SEQ ID NO: 20294 - protein, 8 aa, BK virus
HEDMFASD

SEQ ID NO: 20295 - protein, 8 aa, BK virus
EDMFASDE

SEQ ID NO: 20296 - protein, 8 aa, BK virus
DMFASDEE

SEQ ID NO: 20297 - protein, 8 aa, BK virus
MFASDEEA

SEQ ID NO: 20298 - protein, 8 aa, BK virus
FASDEEAT

SEQ ID NO: 20299 - protein, 8 aa, BK virus
ASDEEATA

SEQ ID NO: 20300 - protein, 8 aa, BK virus
SDEEATAD

SEQ ID NO: 20301 - protein, 8 aa, BK virus
DEEATADS

SEQ ID NO: 20302 - protein, 8 aa, BK virus
EEATADSQ

SEQ ID NO: 20303 - protein, 8 aa, BK virus
EATADSQH

SEQ ID NO: 20304 - protein, 8 aa, BK virus
ATADSQHS

SEQ ID NO: 20305 - protein, 8 aa, BK virus
TADSQHST

SEQ ID NO: 20306 - protein, 8 aa, BK virus
ADSQHSTP

SEQ ID NO: 20307 - protein, 8 aa, BK virus
DSQHSTPP

SEQ ID NO: 20308 - protein, 8 aa, BK virus
SQHSTPPK

SEQ ID NO: 20309 - protein, 8 aa, BK virus
QHSTPPKK

SEQ ID NO: 20310 - protein, 8 aa, BK virus
HSTPPKKK

SEQ ID NO: 20311 - protein, 8 aa, BK virus
STPPKKKR

SEQ ID NO: 20312 - protein, 8 aa, BK virus
TPPKKKRK

SEQ ID NO: 20313 - protein, 8 aa, BK virus
PPKKKRKV

SEQ ID NO: 20314 - protein, 8 aa, BK virus
PKKKRKVE

SEQ ID NO: 20315 - protein, 8 aa, BK virus
KKKRKVED

SEQ ID NO: 20316 - protein, 8 aa, BK virus
KKRKVEDP

SEQ ID NO: 20317 - protein, 8 aa, BK virus
KRKVEDPK

SEQ ID NO: 20318 - protein, 8 aa, BK virus
RKVEDPKD

SEQ ID NO: 20319 - protein, 8 aa, BK virus
KVEDPKDF

SEQ ID NO: 20320 - protein, 8 aa, BK virus
VEDPKDFP

SEQ ID NO: 20321 - protein, 8 aa, BK virus
EDPKDFPS

SEQ ID NO: 20322 - protein, 8 aa, BK virus
DPKDFPSD

SEQ ID NO: 20323 - protein, 8 aa, BK virus
PKDFPSDL

SEQ ID NO: 20324 - protein, 8 aa, BK virus
KDFPSDLH

SEQ ID NO: 20325 - protein, 8 aa, BK virus
DFPSDLHQ

SEQ ID NO: 20326 - protein, 8 aa, BK virus
FPSDLHQF

SEQ ID NO: 20327 - protein, 8 aa, BK virus
PSDLHQFL

SEQ ID NO: 20328 - protein, 8 aa, BK virus
SDLHQFLS

SEQ ID NO: 20329 - protein, 8 aa, BK virus
DLHQFLSQ

SEQ ID NO: 20330 - protein, 8 aa, BK virus
LHQFLSQA

SEQ ID NO: 20331 - protein, 8 aa, BK virus
HQFLSQAV

SEQ ID NO: 20332 - protein, 8 aa, BK virus
QFLSQAVF

SEQ ID NO: 20333 - protein, 8 aa, BK virus
FLSQAVFS

SEQ ID NO: 20334 - protein, 8 aa, BK virus
LSQAVFSN

SEQ ID NO: 20335 - protein, 8 aa, BK virus
SQAVFSNR

SEQ ID NO: 20336 - protein, 8 aa, BK virus
QAVFSNRT

SEQ ID NO: 20337 - protein, 8 aa, BK virus
AVFSNRTL

SEQ ID NO: 20338 - protein, 8 aa, BK virus
VFSNRTLA

SEQ ID NO: 20339 - protein, 8 aa, BK virus
FSNRTLAC

SEQ ID NO: 20340 - protein, 8 aa, BK virus
SNRTLACF

SEQ ID NO: 20341 - protein, 8 aa, BK virus
NRTLACFA

SEQ ID NO: 20342 - protein, 8 aa, BK virus
RTLACFAV

SEQ ID NO: 20343 - protein, 8 aa, BK virus
TLACFAVY

SEQ ID NO: 20344 - protein, 8 aa, BK virus
LACFAVYT

SEQ ID NO: 20345 - protein, 8 aa, BK virus
ACFAVYTT

SEQ ID NO: 20346 - protein, 8 aa, BK virus
CFAVYTTK

SEQ ID NO: 20347 - protein, 8 aa, BK virus
FAVYTTKE

SEQ ID NO: 20348 - protein, 8 aa, BK virus
AVYTTKEK

SEQ ID NO: 20349 - protein, 8 aa, BK virus
VYTTKEKA

SEQ ID NO: 20350 - protein, 8 aa, BK virus
YTTKEKAQ

SEQ ID NO: 20351 - protein, 8 aa, BK virus
TTKEKAQI

SEQ ID NO: 20352 - protein, 8 aa, BK virus
TKEKAQIL

SEQ ID NO: 20353 - protein, 8 aa, BK virus
KEKAQILY

SEQ ID NO: 20354 - protein, 8 aa, BK virus
EKAQILYK

SEQ ID NO: 20355 - protein, 8 aa, BK virus
KAQILYKK

SEQ ID NO: 20356 - protein, 8 aa, BK virus
AQILYKKL

SEQ ID NO: 20357 - protein, 8 aa, BK virus
QILYKKLM

SEQ ID NO: 20358 - protein, 8 aa, BK virus
ILYKKLME

SEQ ID NO: 20359 - protein, 8 aa, BK virus
LYKKLMEK

SEQ ID NO: 20360 - protein, 8 aa, BK virus
YKKLMEKY

SEQ ID NO: 20361 - protein, 8 aa, BK virus
KKLMEKYS

SEQ ID NO: 20362 - protein, 8 aa, BK virus
KLMEKYSV

SEQ ID NO: 20363 - protein, 8 aa, BK virus
LMEKYSVT

SEQ ID NO: 20364 - protein, 8 aa, BK virus
MEKYSVTF

SEQ ID NO: 20365 - protein, 8 aa, BK virus
EKYSVTFI

SEQ ID NO: 20366 - protein, 8 aa, BK virus
KYSVTFIS

SEQ ID NO: 20367 - protein, 8 aa, BK virus
YSVTFISR

SEQ ID NO: 20368 - protein, 8 aa, BK virus
SVTFISRH

SEQ ID NO: 20369 - protein, 8 aa, BK virus
VTFISRHM

SEQ ID NO: 20370 - protein, 8 aa, BK virus
TFISRHMC

SEQ ID NO: 20371 - protein, 8 aa, BK virus
FISRHMCA

SEQ ID NO: 20372 - protein, 8 aa, BK virus
ISRHMCAG

SEQ ID NO: 20373 - protein, 8 aa, BK virus
SRHMCAGH

SEQ ID NO: 20374 - protein, 8 aa, BK virus
RHMCAGHN

SEQ ID NO: 20375 - protein, 8 aa, BK virus
HMCAGHNI

SEQ ID NO: 20376 - protein, 8 aa, BK virus
MCAGHNII

SEQ ID NO: 20377 - protein, 8 aa, BK virus
CAGHNIIF

SEQ ID NO: 20378 - protein, 8 aa, BK virus
AGHNIIFF

SEQ ID NO: 20379 - protein, 8 aa, BK virus
GHNIIFFL

SEQ ID NO: 20380 - protein, 8 aa, BK virus
HNIIFFLT

SEQ ID NO: 20381 - protein, 8 aa, BK virus
NIIFFLTP

SEQ ID NO: 20382 - protein, 8 aa, BK virus
IIFFLTPH

SEQ ID NO: 20383 - protein, 8 aa, BK virus
IFFLTPHR

SEQ ID NO: 20384 - protein, 8 aa, BK virus
FFLTPHRH

SEQ ID NO: 20385 - protein, 8 aa, BK virus
FLTPHRHR

SEQ ID NO: 20386 - protein, 8 aa, BK virus
LTPHRHRV

SEQ ID NO: 20387 - protein, 8 aa, BK virus
TPHRHRVS

SEQ ID NO: 20388 - protein, 8 aa, BK virus
PHRHRVSA

SEQ ID NO: 20389 - protein, 8 aa, BK virus
HRHRVSAI

SEQ ID NO: 20390 - protein, 8 aa, BK virus
RHRVSAIN

SEQ ID NO: 20391 - protein, 8 aa, BK virus
HRVSAINN

SEQ ID NO: 20392 - protein, 8 aa, BK virus
RVSAINNF

SEQ ID NO: 20393 - protein, 8 aa, BK virus
VSAINNFC

SEQ ID NO: 20394 - protein, 8 aa, BK virus
SAINNFCQ

SEQ ID NO: 20395 - protein, 8 aa, BK virus
AINNFCQK

SEQ ID NO: 20396 - protein, 8 aa, BK virus
INNFCQKL

SEQ ID NO: 20397 - protein, 8 aa, BK virus
NNFCQKLC

SEQ ID NO: 20398 - protein, 8 aa, BK virus
NFCQKLCT

SEQ ID NO: 20399 - protein, 8 aa, BK virus
FCQKLCTF

SEQ ID NO: 20400 - protein, 8 aa, BK virus
CQKLCTFS

SEQ ID NO: 20401 - protein, 8 aa, BK virus
QKLCTFSF

SEQ ID NO: 20402 - protein, 8 aa, BK virus
KLCTFSFL

SEQ ID NO: 20403 - protein, 8 aa, BK virus
LCTFSFLI

SEQ ID NO: 20404 - protein, 8 aa, BK virus
CTFSFLIC

SEQ ID NO: 20405 - protein, 8 aa, BK virus
TFSFLICK

SEQ ID NO: 20406 - protein, 8 aa, BK virus
FSFLICKG

SEQ ID NO: 20407 - protein, 8 aa, BK virus
SFLICKGV

SEQ ID NO: 20408 - protein, 8 aa, BK virus
FLICKGVN

SEQ ID NO: 20409 - protein, 8 aa, BK virus
LICKGVNK

SEQ ID NO: 20410 - protein, 8 aa, BK virus
ICKGVNKE

SEQ ID NO: 20411 - protein, 8 aa, BK virus
CKGVNKEY

SEQ ID NO: 20412 - protein, 8 aa, BK virus
KGVNKEYL

SEQ ID NO: 20413 - protein, 8 aa, BK virus
GVNKEYLL

SEQ ID NO: 20414 - protein, 8 aa, BK virus
VNKEYLLY

SEQ ID NO: 20415 - protein, 8 aa, BK virus
NKEYLLYS

SEQ ID NO: 20416 - protein, 8 aa, BK virus
KEYLLYSA

SEQ ID NO: 20417 - protein, 8 aa, BK virus
EYLLYSAL

SEQ ID NO: 20418 - protein, 8 aa, BK virus
YLLYSALT

SEQ ID NO: 20419 - protein, 8 aa, BK virus
LLYSALTR

SEQ ID NO: 20420 - protein, 8 aa, BK virus
LYSALTRD

SEQ ID NO: 20421 - protein, 8 aa, BK virus
YSALTRDP

SEQ ID NO: 20422 - protein, 8 aa, BK virus
SALTRDPY

SEQ ID NO: 20423 - protein, 8 aa, BK virus
ALTRDPYH

SEQ ID NO: 20424 - protein, 8 aa, BK virus
LTRDPYHT

SEQ ID NO: 20425 - protein, 8 aa, BK virus
TRDPYHTI

SEQ ID NO: 20426 - protein, 8 aa, BK virus
RDPYHTIE

SEQ ID NO: 20427 - protein, 8 aa, BK virus
DPYHTIEE

SEQ ID NO: 20428 - protein, 8 aa, BK virus
PYHTIEES

SEQ ID NO: 20429 - protein, 8 aa, BK virus
YHTIEESI

SEQ ID NO: 20430 - protein, 8 aa, BK virus
HTIEESIQ

SEQ ID NO: 20431 - protein, 8 aa, BK virus
TIEESIQG

SEQ ID NO: 20432 - protein, 8 aa, BK virus
IEESIQGG

SEQ ID NO: 20433 - protein, 8 aa, BK virus
EESIQGGL

SEQ ID NO: 20434 - protein, 8 aa, BK virus
ESIQGGLK

SEQ ID NO: 20435 - protein, 8 aa, BK virus
SIQGGLKE

SEQ ID NO: 20436 - protein, 8 aa, BK virus
IQGGLKEH

SEQ ID NO: 20437 - protein, 8 aa, BK virus
QGGLKEHD

SEQ ID NO: 20438 - protein, 8 aa, BK virus
GGLKEHDF

SEQ ID NO: 20439 - protein, 8 aa, BK virus
GLKEHDFS

SEQ ID NO: 20440 - protein, 8 aa, BK virus
LKEHDFSP

SEQ ID NO: 20441 - protein, 8 aa, BK virus
KEHDFSPE

SEQ ID NO: 20442 - protein, 8 aa, BK virus
EHDFSPEE

SEQ ID NO: 20443 - protein, 8 aa, BK virus
HDFSPEEP

SEQ ID NO: 20444 - protein, 8 aa, BK virus
DFSPEEPE

SEQ ID NO: 20445 - protein, 8 aa, BK virus
FSPEEPEE

SEQ ID NO: 20446 - protein, 8 aa, BK virus
SPEEPEET

SEQ ID NO: 20447 - protein, 8 aa, BK virus
PEEPEETK

SEQ ID NO: 20448 - protein, 8 aa, BK virus
EEPEETKQ

SEQ ID NO: 20449 - protein, 8 aa, BK virus
EPEETKQV

SEQ ID NO: 20450 - protein, 8 aa, BK virus
PEETKQVS

SEQ ID NO: 20451 - protein, 8 aa, BK virus
EETKQVSW

SEQ ID NO: 20452 - protein, 8 aa, BK virus
ETKQVSWK

SEQ ID NO: 20453 - protein, 8 aa, BK virus
TKQVSWKL

SEQ ID NO: 20454 - protein, 8 aa, BK virus
KQVSWKLI

SEQ ID NO: 20455 - protein, 8 aa, BK virus
QVSWKLIT

SEQ ID NO: 20456 - protein, 8 aa, BK virus
VSWKLITE

SEQ ID NO: 20457 - protein, 8 aa, BK virus
SWKLITEY

SEQ ID NO: 20458 - protein, 8 aa, BK virus
WKLITEYA

SEQ ID NO: 20459 - protein, 8 aa, BK virus
KLITEYAV

SEQ ID NO: 20460 - protein, 8 aa, BK virus
LITEYAVE

SEQ ID NO: 20461 - protein, 8 aa, BK virus
ITEYAVET

SEQ ID NO: 20462 - protein, 8 aa, BK virus
TEYAVETK

SEQ ID NO: 20463 - protein, 8 aa, BK virus
EYAVETKC

SEQ ID NO: 20464 - protein, 8 aa, BK virus
YAVETKCE

SEQ ID NO: 20465 - protein, 8 aa, BK virus
AVETKCED

SEQ ID NO: 20466 - protein, 8 aa, BK virus
VETKCEDV

SEQ ID NO: 20467 - protein, 8 aa, BK virus
ETKCEDVF

SEQ ID NO: 20468 - protein, 8 aa, BK virus
TKCEDVFL

SEQ ID NO: 20469 - protein, 8 aa, BK virus
KCEDVFLL

SEQ ID NO: 20470 - protein, 8 aa, BK virus
CEDVFLLL

SEQ ID NO: 20471 - protein, 8 aa, BK virus
EDVFLLLG

SEQ ID NO: 20472 - protein, 8 aa, BK virus
DVFLLLGM

SEQ ID NO: 20473 - protein, 8 aa, BK virus
VFLLLGMY

SEQ ID NO: 20474 - protein, 8 aa, BK virus
FLLLGMYL

SEQ ID NO: 20475 - protein, 8 aa, BK virus
LLLGMYLE

SEQ ID NO: 20476 - protein, 8 aa, BK virus
LLGMYLEF

SEQ ID NO: 20477 - protein, 8 aa, BK virus
LGMYLEFQ

SEQ ID NO: 20478 - protein, 8 aa, BK virus
GMYLEFQY

SEQ ID NO: 20479 - protein, 8 aa, BK virus
MYLEFQYN

SEQ ID NO: 20480 - protein, 8 aa, BK virus
YLEFQYNV

SEQ ID NO: 20481 - protein, 8 aa, BK virus
LEFQYNVE

SEQ ID NO: 20482 - protein, 8 aa, BK virus
EFQYNVEE

SEQ ID NO: 20483 - protein, 8 aa, BK virus
FQYNVEEC

SEQ ID NO: 20484 - protein, 8 aa, BK virus
QYNVEECK

SEQ ID NO: 20485 - protein, 8 aa, BK virus
YNVEECKK

SEQ ID NO: 20486 - protein, 8 aa, BK virus
NVEECKKC

SEQ ID NO: 20487 - protein, 8 aa, BK virus
VEECKKCQ

SEQ ID NO: 20488 - protein, 8 aa, BK virus
EECKKCQK

SEQ ID NO: 20489 - protein, 8 aa, BK virus
ECKKCQKK

SEQ ID NO: 20490 - protein, 8 aa, BK virus
CKKCQKKD

SEQ ID NO: 20491 - protein, 8 aa, BK virus
KKCQKKDQ

SEQ ID NO: 20492 - protein, 8 aa, BK virus
KCQKKDQP

SEQ ID NO: 20493 - protein, 8 aa, BK virus
CQKKDQPY

SEQ ID NO: 20494 - protein, 8 aa, BK virus
QKKDQPYH

SEQ ID NO: 20495 - protein, 8 aa, BK virus
KKDQPYHF

SEQ ID NO: 20496 - protein, 8 aa, BK virus
KDQPYHFK

SEQ ID NO: 20497 - protein, 8 aa, BK virus
DQPYHFKY

SEQ ID NO: 20498 - protein, 8 aa, BK virus
QPYHFKYH

SEQ ID NO: 20499 - protein, 8 aa, BK virus
PYHFKYHE

SEQ ID NO: 20500 - protein, 8 aa, BK virus
YHFKYHEK

SEQ ID NO: 20501 - protein, 8 aa, BK virus
HFKYHEKH

SEQ ID NO: 20502 - protein, 8 aa, BK virus
FKYHEKHF

SEQ ID NO: 20503 - protein, 8 aa, BK virus
KYHEKHFA

SEQ ID NO: 20504 - protein, 8 aa, BK virus
YHEKHFAN

SEQ ID NO: 20505 - protein, 8 aa, BK virus
HEKHFANA

SEQ ID NO: 20506 - protein, 8 aa, BK virus
EKHFANAI

SEQ ID NO: 20507 - protein, 8 aa, BK virus
KHFANAII

SEQ ID NO: 20508 - protein, 8 aa, BK virus
HFANAIIF

SEQ ID NO: 20509 - protein, 8 aa, BK virus
FANAIIFA

SEQ ID NO: 20510 - protein, 8 aa, BK virus
ANAIIFAE

SEQ ID NO: 20511 - protein, 8 aa, BK virus
NAIIFAES

SEQ ID NO: 20512 - protein, 8 aa, BK virus
AIIFAESK

SEQ ID NO: 20513 - protein, 8 aa, BK virus
IIFAESKN

SEQ ID NO: 20514 - protein, 8 aa, BK virus
IFAESKNQ

SEQ ID NO: 20515 - protein, 8 aa, BK virus
FAESKNQK

SEQ ID NO: 20516 - protein, 8 aa, BK virus
AESKNQKS

SEQ ID NO: 20517 - protein, 8 aa, BK virus
ESKNQKSI

SEQ ID NO: 20518 - protein, 8 aa, BK virus
SKNQKSIC

SEQ ID NO: 20519 - protein, 8 aa, BK virus
KNQKSICQ

SEQ ID NO: 20520 - protein, 8 aa, BK virus
NQKSICQQ

SEQ ID NO: 20521 - protein, 8 aa, BK virus
QKSICQQA

SEQ ID NO: 20522 - protein, 8 aa, BK virus
KSICQQAV

SEQ ID NO: 20523 - protein, 8 aa, BK virus
SICQQAVD

SEQ ID NO: 20524 - protein, 8 aa, BK virus
ICQQAVDT

SEQ ID NO: 20525 - protein, 8 aa, BK virus
CQQAVDTV

SEQ ID NO: 20526 - protein, 8 aa, BK virus
QQAVDTVL

SEQ ID NO: 20527 - protein, 8 aa, BK virus
QAVDTVLA

SEQ ID NO: 20528 - protein, 8 aa, BK virus
AVDTVLAK

SEQ ID NO: 20529 - protein, 8 aa, BK virus
VDTVLAKK

SEQ ID NO: 20530 - protein, 8 aa, BK virus
DTVLAKKR

SEQ ID NO: 20531 - protein, 8 aa, BK virus
TVLAKKRV

SEQ ID NO: 20532 - protein, 8 aa, BK virus
VLAKKRVD

SEQ ID NO: 20533 - protein, 8 aa, BK virus
LAKKRVDT

SEQ ID NO: 20534 - protein, 8 aa, BK virus
AKKRVDTL

SEQ ID NO: 20535 - protein, 8 aa, BK virus
KKRVDTLH

SEQ ID NO: 20536 - protein, 8 aa, BK virus
KRVDTLHM

SEQ ID NO: 20537 - protein, 8 aa, BK virus
RVDTLHMT

SEQ ID NO: 20538 - protein, 8 aa, BK virus
VDTLHMTR

SEQ ID NO: 20539 - protein, 8 aa, BK virus
DTLHMTRE

SEQ ID NO: 20540 - protein, 8 aa, BK virus
TLHMTREE

SEQ ID NO: 20541 - protein, 8 aa, BK virus
LHMTREEM

SEQ ID NO: 20542 - protein, 8 aa, BK virus
HMTREEML

SEQ ID NO: 20543 - protein, 8 aa, BK virus
MTREEMLT

SEQ ID NO: 20544 - protein, 8 aa, BK virus
TREEMLTE

SEQ ID NO: 20545 - protein, 8 aa, BK virus
REEMLTER

SEQ ID NO: 20546 - protein, 8 aa, BK virus
EEMLTERF

SEQ ID NO: 20547 - protein, 8 aa, BK virus
EMLTERFN

SEQ ID NO: 20548 - protein, 8 aa, BK virus
MLTERFNH

SEQ ID NO: 20549 - protein, 8 aa, BK virus
LTERFNHI

SEQ ID NO: 20550 - protein, 8 aa, BK virus
TERFNHIL

SEQ ID NO: 20551 - protein, 8 aa, BK virus
ERFNHILD

SEQ ID NO: 20552 - protein, 8 aa, BK virus
RFNHILDK

SEQ ID NO: 20553 - protein, 8 aa, BK virus
FNHILDKM

SEQ ID NO: 20554 - protein, 8 aa, BK virus
NHILDKMD

SEQ ID NO: 20555 - protein, 8 aa, BK virus
HILDKMDL

SEQ ID NO: 20556 - protein, 8 aa, BK virus
ILDKMDLI

SEQ ID NO: 20557 - protein, 8 aa, BK virus
LDKMDLIF

SEQ ID NO: 20558 - protein, 8 aa, BK virus
DKMDLIFG

SEQ ID NO: 20559 - protein, 8 aa, BK virus
KMDLIFGA

SEQ ID NO: 20560 - protein, 8 aa, BK virus
MDLIFGAH

SEQ ID NO: 20561 - protein, 8 aa, BK virus
DLIFGAHG

SEQ ID NO: 20562 - protein, 8 aa, BK virus
LIFGAHGN

SEQ ID NO: 20563 - protein, 8 aa, BK virus
IFGAHGNA

SEQ ID NO: 20564 - protein, 8 aa, BK virus
FGAHGNAV

SEQ ID NO: 20565 - protein, 8 aa, BK virus
GAHGNAVL

SEQ ID NO: 20566 - protein, 8 aa, BK virus
AHGNAVLE

SEQ ID NO: 20567 - protein, 8 aa, BK virus
HGNAVLEQ

SEQ ID NO: 20568 - protein, 8 aa, BK virus
GNAVLEQY

SEQ ID NO: 20569 - protein, 8 aa, BK virus
NAVLEQYM

SEQ ID NO: 20570 - protein, 8 aa, BK virus
AVLEQYMA

SEQ ID NO: 20571 - protein, 8 aa, BK virus
VLEQYMAG

SEQ ID NO: 20572 - protein, 8 aa, BK virus
LEQYMAGV

SEQ ID NO: 20573 - protein, 8 aa, BK virus
EQYMAGVA

SEQ ID NO: 20574 - protein, 8 aa, BK virus
QYMAGVAW

SEQ ID NO: 20575 - protein, 8 aa, BK virus
YMAGVAWL

SEQ ID NO: 20576 - protein, 8 aa, BK virus
MAGVAWLH

SEQ ID NO: 20577 - protein, 8 aa, BK virus
AGVAWLHC

SEQ ID NO: 20578 - protein, 8 aa, BK virus
GVAWLHCL

SEQ ID NO: 20579 - protein, 8 aa, BK virus
VAWLHCLL

SEQ ID NO: 20580 - protein, 8 aa, BK virus
AWLHCLLP

SEQ ID NO: 20581 - protein, 8 aa, BK virus
WLHCLLPK

SEQ ID NO: 20582 - protein, 8 aa, BK virus
LHCLLPKM

SEQ ID NO: 20583 - protein, 8 aa, BK virus
HCLLPKMD

SEQ ID NO: 20584 - protein, 8 aa, BK virus
CLLPKMDS

SEQ ID NO: 20585 - protein, 8 aa, BK virus
LLPKMDSV

SEQ ID NO: 20586 - protein, 8 aa, BK virus
LPKMDSVI

SEQ ID NO: 20587 - protein, 8 aa, BK virus
PKMDSVIF

SEQ ID NO: 20588 - protein, 8 aa, BK virus
KMDSVIFD

SEQ ID NO: 20589 - protein, 8 aa, BK virus
MDSVIFDF

SEQ ID NO: 20590 - protein, 8 aa, BK virus
DSVIFDFL

SEQ ID NO: 20591 - protein, 8 aa, BK virus
SVIFDFLH

SEQ ID NO: 20592 - protein, 8 aa, BK virus
VIFDFLHC

SEQ ID NO: 20593 - protein, 8 aa, BK virus
IFDFLHCI

SEQ ID NO: 20594 - protein, 8 aa, BK virus
FDFLHCIV

SEQ ID NO: 20595 - protein, 8 aa, BK virus
DFLHCIVF

SEQ ID NO: 20596 - protein, 8 aa, BK virus
FLHCIVFN

SEQ ID NO: 20597 - protein, 8 aa, BK virus
LHCIVFNV

SEQ ID NO: 20598 - protein, 8 aa, BK virus
HCIVFNVP

SEQ ID NO: 20599 - protein, 8 aa, BK virus
CIVFNVPK

SEQ ID NO: 20600 - protein, 8 aa, BK virus
IVFNVPKR

SEQ ID NO: 20601 - protein, 8 aa, BK virus
VFNVPKRR

SEQ ID NO: 20602 - protein, 8 aa, BK virus
FNVPKRRY

SEQ ID NO: 20603 - protein, 8 aa, BK virus
NVPKRRYW

SEQ ID NO: 20604 - protein, 8 aa, BK virus
VPKRRYWL

SEQ ID NO: 20605 - protein, 8 aa, BK virus
PKRRYWLF

SEQ ID NO: 20606 - protein, 8 aa, BK virus
KRRYWLFK

SEQ ID NO: 20607 - protein, 8 aa, BK virus
RRYWLFKG

SEQ ID NO: 20608 - protein, 8 aa, BK virus
RYWLFKGP

SEQ ID NO: 20609 - protein, 8 aa, BK virus
YWLFKGPI

SEQ ID NO: 20610 - protein, 8 aa, BK virus
WLFKGPID

SEQ ID NO: 20611 - protein, 8 aa, BK virus
LFKGPIDS

SEQ ID NO: 20612 - protein, 8 aa, BK virus
FKGPIDSG

SEQ ID NO: 20613 - protein, 8 aa, BK virus
KGPIDSGK

SEQ ID NO: 20614 - protein, 8 aa, BK virus
GPIDSGKT

SEQ ID NO: 20615 - protein, 8 aa, BK virus
PIDSGKTT

SEQ ID NO: 20616 - protein, 8 aa, BK virus
IDSGKTTL

SEQ ID NO: 20617 - protein, 8 aa, BK virus
DSGKTTLA

SEQ ID NO: 20618 - protein, 8 aa, BK virus
SGKTTLAA

SEQ ID NO: 20619 - protein, 8 aa, BK virus
GKTTLAAG

SEQ ID NO: 20620 - protein, 8 aa, BK virus
KTTLAAGL

SEQ ID NO: 20621 - protein, 8 aa, BK virus
TTLAAGLL

SEQ ID NO: 20622 - protein, 8 aa, BK virus
TLAAGLLD

SEQ ID NO: 20623 - protein, 8 aa, BK virus
LAAGLLDL

SEQ ID NO: 20624 - protein, 8 aa, BK virus
AAGLLDLC

SEQ ID NO: 20625 - protein, 8 aa, BK virus
AGLLDLCG

SEQ ID NO: 20626 - protein, 8 aa, BK virus
GLLDLCGG

SEQ ID NO: 20627 - protein, 8 aa, BK virus
LLDLCGGK

SEQ ID NO: 20628 - protein, 8 aa, BK virus
LDLCGGKA

SEQ ID NO: 20629 - protein, 8 aa, BK virus
DLCGGKAL

SEQ ID NO: 20630 - protein, 8 aa, BK virus
LCGGKALN

SEQ ID NO: 20631 - protein, 8 aa, BK virus
CGGKALNV

SEQ ID NO: 20632 - protein, 8 aa, BK virus
GGKALNVN

SEQ ID NO: 20633 - protein, 8 aa, BK virus
GKALNVNL

SEQ ID NO: 20634 - protein, 8 aa, BK virus
KALNVNLP

SEQ ID NO: 20635 - protein, 8 aa, BK virus
ALNVNLPM

SEQ ID NO: 20636 - protein, 8 aa, BK virus
LNVNLPME

SEQ ID NO: 20637 - protein, 8 aa, BK virus
NVNLPMER

SEQ ID NO: 20638 - protein, 8 aa, BK virus
VNLPMERL

SEQ ID NO: 20639 - protein, 8 aa, BK virus
NLPMERLT

SEQ ID NO: 20640 - protein, 8 aa, BK virus
LPMERLTF

SEQ ID NO: 20641 - protein, 8 aa, BK virus
PMERLTFE

SEQ ID NO: 20642 - protein, 8 aa, BK virus
MERLTFEL

SEQ ID NO: 20643 - protein, 8 aa, BK virus
ERLTFELG

SEQ ID NO: 20644 - protein, 8 aa, BK virus
RLTFELGV

SEQ ID NO: 20645 - protein, 8 aa, BK virus
LTFELGVA

SEQ ID NO: 20646 - protein, 8 aa, BK virus
TFELGVAI

SEQ ID NO: 20647 - protein, 8 aa, BK virus
FELGVAID

SEQ ID NO: 20648 - protein, 8 aa, BK virus
ELGVAIDQ

SEQ ID NO: 20649 - protein, 8 aa, BK virus
LGVAIDQY

SEQ ID NO: 20650 - protein, 8 aa, BK virus
GVAIDQYM

SEQ ID NO: 20651 - protein, 8 aa, BK virus
VAIDQYMV

SEQ ID NO: 20652 - protein, 8 aa, BK virus
AIDQYMVV

SEQ ID NO: 20653 - protein, 8 aa, BK virus
IDQYMVVF

SEQ ID NO: 20654 - protein, 8 aa, BK virus
DQYMVVFE

SEQ ID NO: 20655 - protein, 8 aa, BK virus
QYMVVFED

SEQ ID NO: 20656 - protein, 8 aa, BK virus
YMVVFEDV

SEQ ID NO: 20657 - protein, 8 aa, BK virus
MVVFEDVK

SEQ ID NO: 20658 - protein, 8 aa, BK virus
VVFEDVKG

SEQ ID NO: 20659 - protein, 8 aa, BK virus
VFEDVKGT

SEQ ID NO: 20660 - protein, 8 aa, BK virus
FEDVKGTG

SEQ ID NO: 20661 - protein, 8 aa, BK virus
EDVKGTGA

SEQ ID NO: 20662 - protein, 8 aa, BK virus
DVKGTGAE

SEQ ID NO: 20663 - protein, 8 aa, BK virus
VKGTGAES

SEQ ID NO: 20664 - protein, 8 aa, BK virus
KGTGAESK

SEQ ID NO: 20665 - protein, 8 aa, BK virus
GTGAESKD

SEQ ID NO: 20666 - protein, 8 aa, BK virus
TGAESKDL

SEQ ID NO: 20667 - protein, 8 aa, BK virus
GAESKDLP

SEQ ID NO: 20668 - protein, 8 aa, BK virus
AESKDLPS

SEQ ID NO: 20669 - protein, 8 aa, BK virus
ESKDLPSG

SEQ ID NO: 20670 - protein, 8 aa, BK virus
SKDLPSGH

SEQ ID NO: 20671 - protein, 8 aa, BK virus
KDLPSGHG

SEQ ID NO: 20672 - protein, 8 aa, BK virus
DLPSGHGI

SEQ ID NO: 20673 - protein, 8 aa, BK virus
LPSGHGIN

SEQ ID NO: 20674 - protein, 8 aa, BK virus
PSGHGINN

SEQ ID NO: 20675 - protein, 8 aa, BK virus
SGHGINNL

SEQ ID NO: 20676 - protein, 8 aa, BK virus
GHGINNLD

SEQ ID NO: 20677 - protein, 8 aa, BK virus
HGINNLDS

SEQ ID NO: 20678 - protein, 8 aa, BK virus
GINNLDSL

SEQ ID NO: 20679 - protein, 8 aa, BK virus
INNLDSLR

SEQ ID NO: 20680 - protein, 8 aa, BK virus
NNLDSLRD

SEQ ID NO: 20681 - protein, 8 aa, BK virus
NLDSLRDY

SEQ ID NO: 20682 - protein, 8 aa, BK virus
LDSLRDYL

SEQ ID NO: 20683 - protein, 8 aa, BK virus
DSLRDYLD

SEQ ID NO: 20684 - protein, 8 aa, BK virus
SLRDYLDG

SEQ ID NO: 20685 - protein, 8 aa, BK virus
LRDYLDGS

SEQ ID NO: 20686 - protein, 8 aa, BK virus
RDYLDGSV

SEQ ID NO: 20687 - protein, 8 aa, BK virus
DYLDGSVK

SEQ ID NO: 20688 - protein, 8 aa, BK virus
YLDGSVKV

SEQ ID NO: 20689 - protein, 8 aa, BK virus
LDGSVKVN

SEQ ID NO: 20690 - protein, 8 aa, BK virus
DGSVKVNL

SEQ ID NO: 20691 - protein, 8 aa, BK virus
GSVKVNLE

SEQ ID NO: 20692 - protein, 8 aa, BK virus
SVKVNLEK

SEQ ID NO: 20693 - protein, 8 aa, BK virus
VKVNLEKK

SEQ ID NO: 20694 - protein, 8 aa, BK virus
KVNLEKKH

SEQ ID NO: 20695 - protein, 8 aa, BK virus
VNLEKKHL

SEQ ID NO: 20696 - protein, 8 aa, BK virus
NLEKKHLN

SEQ ID NO: 20697 - protein, 8 aa, BK virus
LEKKHLNK

SEQ ID NO: 20698 - protein, 8 aa, BK virus
EKKHLNKR

SEQ ID NO: 20699 - protein, 8 aa, BK virus
KKHLNKRT

SEQ ID NO: 20700 - protein, 8 aa, BK virus
KHLNKRTQ

SEQ ID NO: 20701 - protein, 8 aa, BK virus
HLNKRTQI

SEQ ID NO: 20702 - protein, 8 aa, BK virus
LNKRTQIF

SEQ ID NO: 20703 - protein, 8 aa, BK virus
NKRTQIFP

SEQ ID NO: 20704 - protein, 8 aa, BK virus
KRTQIFPP

SEQ ID NO: 20705 - protein, 8 aa, BK virus
RTQIFPPG

SEQ ID NO: 20706 - protein, 8 aa, BK virus
TQIFPPGL

SEQ ID NO: 20707 - protein, 8 aa, BK virus
QIFPPGLV

SEQ ID NO: 20708 - protein, 8 aa, BK virus
IFPPGLVT

SEQ ID NO: 20709 - protein, 8 aa, BK virus
FPPGLVTM

SEQ ID NO: 20710 - protein, 8 aa, BK virus
PPGLVTMN

SEQ ID NO: 20711 - protein, 8 aa, BK virus
PGLVTMNE

SEQ ID NO: 20712 - protein, 8 aa, BK virus
GLVTMNEY

SEQ ID NO: 20713 - protein, 8 aa, BK virus
LVTMNEYP

SEQ ID NO: 20714 - protein, 8 aa, BK virus
VTMNEYPV

SEQ ID NO: 20715 - protein, 8 aa, BK virus
TMNEYPVP

SEQ ID NO: 20716 - protein, 8 aa, BK virus
MNEYPVPK

SEQ ID NO: 20717 - protein, 8 aa, BK virus
NEYPVPKT

SEQ ID NO: 20718 - protein, 8 aa, BK virus
EYPVPKTL

SEQ ID NO: 20719 - protein, 8 aa, BK virus
YPVPKTLQ

SEQ ID NO: 20720 - protein, 8 aa, BK virus
PVPKTLQA

SEQ ID NO: 20721 - protein, 8 aa, BK virus
VPKTLQAR

SEQ ID NO: 20722 - protein, 8 aa, BK virus
PKTLQARF

SEQ ID NO: 20723 - protein, 8 aa, BK virus
KTLQARFV

SEQ ID NO: 20724 - protein, 8 aa, BK virus
TLQARFVR

SEQ ID NO: 20725 - protein, 8 aa, BK virus
LQARFVRQ

SEQ ID NO: 20726 - protein, 8 aa, BK virus
QARFVRQI

SEQ ID NO: 20727 - protein, 8 aa, BK virus
ARFVRQID

SEQ ID NO: 20728 - protein, 8 aa, BK virus
RFVRQIDF

SEQ ID NO: 20729 - protein, 8 aa, BK virus
FVRQIDFR

SEQ ID NO: 20730 - protein, 8 aa, BK virus
VRQIDFRP

SEQ ID NO: 20731 - protein, 8 aa, BK virus
RQIDFRPK

SEQ ID NO: 20732 - protein, 8 aa, BK virus
QIDFRPKI

SEQ ID NO: 20733 - protein, 8 aa, BK virus
IDFRPKIY

SEQ ID NO: 20734 - protein, 8 aa, BK virus
DFRPKIYL

SEQ ID NO: 20735 - protein, 8 aa, BK virus
FRPKIYLR

SEQ ID NO: 20736 - protein, 8 aa, BK virus
RPKIYLRK

SEQ ID NO: 20737 - protein, 8 aa, BK virus
PKIYLRKS

SEQ ID NO: 20738 - protein, 8 aa, BK virus
KIYLRKSL

SEQ ID NO: 20739 - protein, 8 aa, BK virus
IYLRKSLQ

SEQ ID NO: 20740 - protein, 8 aa, BK virus
YLRKSLQN

SEQ ID NO: 20741 - protein, 8 aa, BK virus
LRKSLQNS

SEQ ID NO: 20742 - protein, 8 aa, BK virus
RKSLQNSE

SEQ ID NO: 20743 - protein, 8 aa, BK virus
KSLQNSEF

SEQ ID NO: 20744 - protein, 8 aa, BK virus
SLQNSEFL

SEQ ID NO: 20745 - protein, 8 aa, BK virus
LQNSEFLL

SEQ ID NO: 20746 - protein, 8 aa, BK virus
QNSEFLLE

SEQ ID NO: 20747 - protein, 8 aa, BK virus
NSEFLLEK

SEQ ID NO: 20748 - protein, 8 aa, BK virus
SEFLLEKR

SEQ ID NO: 20749 - protein, 8 aa, BK virus
EFLLEKRI

SEQ ID NO: 20750 - protein, 8 aa, BK virus
FLLEKRIL

SEQ ID NO: 20751 - protein, 8 aa, BK virus
LLEKRILQ

SEQ ID NO: 20752 - protein, 8 aa, BK virus
LEKRILQS

SEQ ID NO: 20753 - protein, 8 aa, BK virus
EKRILQSG

SEQ ID NO: 20754 - protein, 8 aa, BK virus
KRILQSGM

SEQ ID NO: 20755 - protein, 8 aa, BK virus
RILQSGMT

SEQ ID NO: 20756 - protein, 8 aa, BK virus
ILQSGMTL

SEQ ID NO: 20757 - protein, 8 aa, BK virus
LQSGMTLL

SEQ ID NO: 20758 - protein, 8 aa, BK virus
QSGMTLLL

SEQ ID NO: 20759 - protein, 8 aa, BK virus
SGMTLLLL

SEQ ID NO: 20760 - protein, 8 aa, BK virus
GMTLLLLL

SEQ ID NO: 20761 - protein, 8 aa, BK virus
MTLLLLLI

SEQ ID NO: 20762 - protein, 8 aa, BK virus
TLLLLLIW

SEQ ID NO: 20763 - protein, 8 aa, BK virus
LLLLLIWF

SEQ ID NO: 20764 - protein, 8 aa, BK virus
LLLLIWFR

SEQ ID NO: 20765 - protein, 8 aa, BK virus
LLLIWFRP

SEQ ID NO: 20766 - protein, 8 aa, BK virus
LLIWFRPV

SEQ ID NO: 20767 - protein, 8 aa, BK virus
LIWFRPVA

SEQ ID NO: 20768 - protein, 8 aa, BK virus
IWFRPVAD

SEQ ID NO: 20769 - protein, 8 aa, BK virus
WFRPVADF

SEQ ID NO: 20770 - protein, 8 aa, BK virus
FRPVADFA

SEQ ID NO: 20771 - protein, 8 aa, BK virus
RPVADFAT

SEQ ID NO: 20772 - protein, 8 aa, BK virus
PVADFATD

SEQ ID NO: 20773 - protein, 8 aa, BK virus
VADFATDI

SEQ ID NO: 20774 - protein, 8 aa, BK virus
ADFATDIQ

SEQ ID NO: 20775 - protein, 8 aa, BK virus
DFATDIQS

SEQ ID NO: 20776 - protein, 8 aa, BK virus
FATDIQSR

SEQ ID NO: 20777 - protein, 8 aa, BK virus
ATDIQSRI

SEQ ID NO: 20778 - protein, 8 aa, BK virus
TDIQSRIV

SEQ ID NO: 20779 - protein, 8 aa, BK virus
DIQSRIVE

SEQ ID NO: 20780 - protein, 8 aa, BK virus
IQSRIVEW

SEQ ID NO: 20781 - protein, 8 aa, BK virus
QSRIVEWK

SEQ ID NO: 20782 - protein, 8 aa, BK virus
SRIVEWKE

SEQ ID NO: 20783 - protein, 8 aa, BK virus
RIVEWKER

SEQ ID NO: 20784 - protein, 8 aa, BK virus
IVEWKERL

SEQ ID NO: 20785 - protein, 8 aa, BK virus
VEWKERLD

SEQ ID NO: 20786 - protein, 8 aa, BK virus
EWKERLDS

SEQ ID NO: 20787 - protein, 8 aa, BK virus
WKERLDSE

SEQ ID NO: 20788 - protein, 8 aa, BK virus
KERLDSEI

SEQ ID NO: 20789 - protein, 8 aa, BK virus
ERLDSEIS

SEQ ID NO: 20790 - protein, 8 aa, BK virus
RLDSEISM

SEQ ID NO: 20791 - protein, 8 aa, BK virus
LDSEISMY

SEQ ID NO: 20792 - protein, 8 aa, BK virus
DSEISMYT

SEQ ID NO: 20793 - protein, 8 aa, BK virus
SEISMYTF

SEQ ID NO: 20794 - protein, 8 aa, BK virus
EISMYTFS

SEQ ID NO: 20795 - protein, 8 aa, BK virus
ISMYTFSR

SEQ ID NO: 20796 - protein, 8 aa, BK virus
SMYTFSRM

SEQ ID NO: 20797 - protein, 8 aa, BK virus
MYTFSRMK

SEQ ID NO: 20798 - protein, 8 aa, BK virus
YTFSRMKY

SEQ ID NO: 20799 - protein, 8 aa, BK virus
TFSRMKYN

SEQ ID NO: 20800 - protein, 8 aa, BK virus
FSRMKYNI

SEQ ID NO: 20801 - protein, 8 aa, BK virus
SRMKYNIC

SEQ ID NO: 20802 - protein, 8 aa, BK virus
RMKYNICM

SEQ ID NO: 20803 - protein, 8 aa, BK virus
MKYNICMG

SEQ ID NO: 20804 - protein, 8 aa, BK virus
KYNICMGK

SEQ ID NO: 20805 - protein, 8 aa, BK virus
YNICMGKC

SEQ ID NO: 20806 - protein, 8 aa, BK virus
NICMGKCI

SEQ ID NO: 20807 - protein, 8 aa, BK virus
ICMGKCIL

SEQ ID NO: 20808 - protein, 8 aa, BK virus
CMGKCILD

SEQ ID NO: 20809 - protein, 8 aa, BK virus
MGKCILDI

SEQ ID NO: 20810 - protein, 8 aa, BK virus
GKCILDIT

SEQ ID NO: 20811 - protein, 8 aa, BK virus
KCILDITR

SEQ ID NO: 20812 - protein, 8 aa, BK virus
CILDITRE

SEQ ID NO: 20813 - protein, 8 aa, BK virus
ILDITREE

SEQ ID NO: 20814 - protein, 8 aa, BK virus
LDITREED

SEQ ID NO: 20815 - protein, 8 aa, BK virus
DITREEDS

SEQ ID NO: 20816 - protein, 8 aa, BK virus
ITREEDSE

SEQ ID NO: 20817 - protein, 8 aa, BK virus
TREEDSET

SEQ ID NO: 20818 - protein, 8 aa, BK virus
REEDSETE

SEQ ID NO: 20819 - protein, 8 aa, BK virus
EEDSETED

SEQ ID NO: 20820 - protein, 8 aa, BK virus
EDSETEDS

SEQ ID NO: 20821 - protein, 8 aa, BK virus
DSETEDSG

SEQ ID NO: 20822 - protein, 8 aa, BK virus
SETEDSGH

SEQ ID NO: 20823 - protein, 8 aa, BK virus
ETEDSGHG

SEQ ID NO: 20824 - protein, 8 aa, BK virus
TEDSGHGS

SEQ ID NO: 20825 - protein, 8 aa, BK virus
EDSGHGSS

SEQ ID NO: 20826 - protein, 8 aa, BK virus
DSGHGSST

SEQ ID NO: 20827 - protein, 8 aa, BK virus
SGHGSSTE

SEQ ID NO: 20828 - protein, 8 aa, BK virus
GHGSSTES

SEQ ID NO: 20829 - protein, 8 aa, BK virus
HGSSTESQ

SEQ ID NO: 20830 - protein, 8 aa, BK virus
GSSTESQS

SEQ ID NO: 20831 - protein, 8 aa, BK virus
SSTESQSQ

SEQ ID NO: 20832 - protein, 8 aa, BK virus
STESQSQC

SEQ ID NO: 20833 - protein, 8 aa, BK virus
TESQSQCS

SEQ ID NO: 20834 - protein, 8 aa, BK virus
ESQSQCSS

SEQ ID NO: 20835 - protein, 8 aa, BK virus
SQSQCSSQ

SEQ ID NO: 20836 - protein, 8 aa, BK virus
QSQCSSQV

SEQ ID NO: 20837 - protein, 8 aa, BK virus
SQCSSQVS

SEQ ID NO: 20838 - protein, 8 aa, BK virus
QCSSQVSD

SEQ ID NO: 20839 - protein, 8 aa, BK virus
CSSQVSDT

SEQ ID NO: 20840 - protein, 8 aa, BK virus
SSQVSDTS

SEQ ID NO: 20841 - protein, 8 aa, BK virus
SQVSDTSA

SEQ ID NO: 20842 - protein, 8 aa, BK virus
QVSDTSAP

SEQ ID NO: 20843 - protein, 8 aa, BK virus
VSDTSAPA

SEQ ID NO: 20844 - protein, 8 aa, BK virus
SDTSAPAE

SEQ ID NO: 20845 - protein, 8 aa, BK virus
DTSAPAED

SEQ ID NO: 20846 - protein, 8 aa, BK virus
TSAPAEDS

SEQ ID NO: 20847 - protein, 8 aa, BK virus
SAPAEDSQ

SEQ ID NO: 20848 - protein, 8 aa, BK virus
APAEDSQR

SEQ ID NO: 20849 - protein, 8 aa, BK virus
PAEDSQRS

SEQ ID NO: 20850 - protein, 8 aa, BK virus
AEDSQRSD

SEQ ID NO: 20851 - protein, 8 aa, BK virus
EDSQRSDP

SEQ ID NO: 20852 - protein, 8 aa, BK virus
DSQRSDPH

SEQ ID NO: 20853 - protein, 8 aa, BK virus
SQRSDPHS

SEQ ID NO: 20854 - protein, 8 aa, BK virus
QRSDPHSQ

SEQ ID NO: 20855 - protein, 8 aa, BK virus
RSDPHSQE

SEQ ID NO: 20856 - protein, 8 aa, BK virus
SDPHSQEL

SEQ ID NO: 20857 - protein, 8 aa, BK virus
DPHSQELH

SEQ ID NO: 20858 - protein, 8 aa, BK virus
PHSQELHL

SEQ ID NO: 20859 - protein, 8 aa, BK virus
HSQELHLC

SEQ ID NO: 20860 - protein, 8 aa, BK virus
SQELHLCK

SEQ ID NO: 20861 - protein, 8 aa, BK virus
QELHLCKG

SEQ ID NO: 20862 - protein, 8 aa, BK virus
ELHLCKGF

SEQ ID NO: 20863 - protein, 8 aa, BK virus
LHLCKGFQ

SEQ ID NO: 20864 - protein, 8 aa, BK virus
HLCKGFQC

SEQ ID NO: 20865 - protein, 8 aa, BK virus
LCKGFQCF

SEQ ID NO: 20866 - protein, 8 aa, BK virus
CKGFQCFK

SEQ ID NO: 20867 - protein, 8 aa, BK virus
KGFQCFKR

SEQ ID NO: 20868 - protein, 8 aa, BK virus
GFQCFKRP

SEQ ID NO: 20869 - protein, 8 aa, BK virus
FQCFKRPK

SEQ ID NO: 20870 - protein, 8 aa, BK virus
QCFKRPKT

SEQ ID NO: 20871 - protein, 8 aa, BK virus
CFKRPKTP

SEQ ID NO: 20872 - protein, 8 aa, BK virus
FKRPKTPP

SEQ ID NO: 20873 - protein, 8 aa, BK virus
KRPKTPPP

SEQ ID NO: 20874 - protein, 8 aa, BK virus
RPKTPPPK

SEQ ID NO: 20875 - protein, 8 aa, BK virus
HKLKSGLY

SEQ ID NO: 20876 - protein, 8 aa, BK virus
KLKSGLYK

SEQ ID NO: 20877 - protein, 8 aa, BK virus
LKSGLYKS

SEQ ID NO: 20878 - protein, 8 aa, BK virus
KSGLYKSS

SEQ ID NO: 20879 - protein, 8 aa, BK virus
SGLYKSSI

SEQ ID NO: 20880 - protein, 8 aa, BK virus
GLYKSSIY

SEQ ID NO: 20881 - protein, 8 aa, BK virus
MYMYNKST

SEQ ID NO: 20882 - protein, 8 aa, BK virus
YMYNKSTC

SEQ ID NO: 20883 - protein, 8 aa, BK virus
MYNKSTCL

SEQ ID NO: 20884 - protein, 8 aa, BK virus
YNKSTCLK

SEQ ID NO: 20885 - protein, 8 aa, BK virus
NKSTCLKH

SEQ ID NO: 20886 - protein, 8 aa, BK virus
KSTCLKHF

SEQ ID NO: 20887 - protein, 8 aa, BK virus
STCLKHFG

SEQ ID NO: 20888 - protein, 8 aa, BK virus
TCLKHFGL

SEQ ID NO: 20889 - protein, 8 aa, BK virus
CLKHFGLQ

SEQ ID NO: 20890 - protein, 8 aa, BK virus
LKHFGLQL

SEQ ID NO: 20891 - protein, 8 aa, BK virus
KHFGLQLS

SEQ ID NO: 20892 - protein, 8 aa, BK virus
HFGLQLSL

SEQ ID NO: 20893 - protein, 8 aa, BK virus
FGLQLSLF

SEQ ID NO: 20894 - protein, 8 aa, BK virus
GLQLSLFV

SEQ ID NO: 20895 - protein, 8 aa, BK virus
LQLSLFVN

SEQ ID NO: 20896 - protein, 8 aa, BK virus
QLSLFVNI

SEQ ID NO: 20897 - protein, 8 aa, BK virus
LSLFVNIS

SEQ ID NO: 20898 - protein, 8 aa, BK virus
SLFVNISY

SEQ ID NO: 20899 - protein, 8 aa, BK virus
LFVNISYH

SEQ ID NO: 20900 - protein, 8 aa, BK virus
FVNISYHI

SEQ ID NO: 20901 - protein, 8 aa, BK virus
VNISYHIW

SEQ ID NO: 20902 - protein, 8 aa, BK virus
NISYHIWV

SEQ ID NO: 20903 - protein, 8 aa, BK virus
ISYHIWVP

SEQ ID NO: 20904 - protein, 8 aa, BK virus
SYHIWVPW

SEQ ID NO: 20905 - protein, 8 aa, BK virus
YHIWVPWK

SEQ ID NO: 20906 - protein, 8 aa, BK virus
HIWVPWKS

SEQ ID NO: 20907 - protein, 8 aa, BK virus
IWVPWKSF

SEQ ID NO: 20908 - protein, 8 aa, BK virus
WVPWKSFC

SEQ ID NO: 20909 - protein, 8 aa, BK virus
VPWKSFCA

SEQ ID NO: 20910 - protein, 8 aa, BK virus
PWKSFCAI

SEQ ID NO: 20911 - protein, 8 aa, BK virus
WKSFCAIK

SEQ ID NO: 20912 - protein, 8 aa, BK virus
KSFCAIKH

SEQ ID NO: 20913 - protein, 8 aa, BK virus
SFCAIKHP

SEQ ID NO: 20914 - protein, 8 aa, BK virus
FCAIKHPN

SEQ ID NO: 20915 - protein, 8 aa, BK virus
CAIKHPNL

SEQ ID NO: 20916 - protein, 8 aa, BK virus
AIKHPNLF

SEQ ID NO: 20917 - protein, 8 aa, BK virus
IKHPNLFY

SEQ ID NO: 20918 - protein, 8 aa, BK virus
KHPNLFYL

SEQ ID NO: 20919 - protein, 8 aa, BK virus
HPNLFYLG

SEQ ID NO: 20920 - protein, 8 aa, BK virus
PNLFYLGF

SEQ ID NO: 20921 - protein, 8 aa, BK virus
NLFYLGFH

SEQ ID NO: 20922 - protein, 8 aa, BK virus
LFYLGFHT

SEQ ID NO: 20923 - protein, 8 aa, BK virus
FYLGFHTI

SEQ ID NO: 20924 - protein, 8 aa, BK virus
YLGFHTIH

SEQ ID NO: 20925 - protein, 8 aa, BK virus
LGFHTIHR

SEQ ID NO: 20926 - protein, 8 aa, BK virus
GFHTIHRL

SEQ ID NO: 20927 - protein, 8 aa, BK virus
FHTIHRLP

SEQ ID NO: 20928 - protein, 8 aa, BK virus
HTIHRLPI

SEQ ID NO: 20929 - protein, 8 aa, BK virus
TIHRLPIH

SEQ ID NO: 20930 - protein, 8 aa, BK virus
IHRLPIHS

SEQ ID NO: 20931 - protein, 8 aa, BK virus
HRLPIHSL

SEQ ID NO: 20932 - protein, 8 aa, BK virus
RLPIHSLG

SEQ ID NO: 20933 - protein, 8 aa, BK virus
LPIHSLGS

SEQ ID NO: 20934 - protein, 8 aa, BK virus
PIHSLGSP

SEQ ID NO: 20935 - protein, 8 aa, BK virus
IHSLGSPV

SEQ ID NO: 20936 - protein, 8 aa, BK virus
HSLGSPVY

SEQ ID NO: 20937 - protein, 8 aa, BK virus
SLGSPVYK

SEQ ID NO: 20938 - protein, 8 aa, BK virus
LGSPVYKV

SEQ ID NO: 20939 - protein, 8 aa, BK virus
GSPVYKVT

SEQ ID NO: 20940 - protein, 8 aa, BK virus
QKGNWVRI

SEQ ID NO: 20941 - protein, 8 aa, BK virus
KGNWVRIL

SEQ ID NO: 20942 - protein, 8 aa, BK virus
GNWVRILY

SEQ ID NO: 20943 - protein, 8 aa, BK virus
NWVRILYR

SEQ ID NO: 20944 - protein, 8 aa, BK virus
WVRILYRS

SEQ ID NO: 20945 - protein, 8 aa, BK virus
VRILYRSF

SEQ ID NO: 20946 - protein, 8 aa, BK virus
RILYRSFS

SEQ ID NO: 20947 - protein, 8 aa, BK virus
ILYRSFSQ

SEQ ID NO: 20948 - protein, 8 aa, BK virus
LYRSFSQA

SEQ ID NO: 20949 - protein, 8 aa, BK virus
YRSFSQAD

SEQ ID NO: 20950 - protein, 8 aa, BK virus
RSFSQADL

SEQ ID NO: 20951 - protein, 8 aa, BK virus
SFSQADLK

SEQ ID NO: 20952 - protein, 8 aa, BK virus
FSQADLKI

SEQ ID NO: 20953 - protein, 8 aa, BK virus
SQADLKIS

SEQ ID NO: 20954 - protein, 8 aa, BK virus
QADLKISC

SEQ ID NO: 20955 - protein, 8 aa, BK virus
ADLKISCK

SEQ ID NO: 20956 - protein, 8 aa, BK virus
DLKISCKA

SEQ ID NO: 20957 - protein, 8 aa, BK virus
LKISCKAS

SEQ ID NO: 20958 - protein, 8 aa, BK virus
KISCKASP

SEQ ID NO: 20959 - protein, 8 aa, BK virus
ISCKASPL

SEQ ID NO: 20960 - protein, 8 aa, BK virus
SCKASPLL

SEQ ID NO: 20961 - protein, 8 aa, BK virus
CKASPLLC

SEQ ID NO: 20962 - protein, 8 aa, BK virus
KASPLLCS

SEQ ID NO: 20963 - protein, 8 aa, BK virus
ASPLLCSR

SEQ ID NO: 20964 - protein, 8 aa, BK virus
SPLLCSRA

SEQ ID NO: 20965 - protein, 8 aa, BK virus
PLLCSRAV

SEQ ID NO: 20966 - protein, 8 aa, BK virus
LLCSRAVS

SEQ ID NO: 20967 - protein, 8 aa, BK virus
LCSRAVSK

SEQ ID NO: 20968 - protein, 8 aa, BK virus
CSRAVSKQ

SEQ ID NO: 20969 - protein, 8 aa, BK virus
SRAVSKQA

SEQ ID NO: 20970 - protein, 8 aa, BK virus
RAVSKQAT

SEQ ID NO: 20971 - protein, 8 aa, BK virus
AVSKQATN

SEQ ID NO: 20972 - protein, 8 aa, BK virus
VSKQATNI

SEQ ID NO: 20973 - protein, 8 aa, BK virus
SKQATNIS

SEQ ID NO: 20974 - protein, 8 aa, BK virus
KQATNISS

SEQ ID NO: 20975 - protein, 8 aa, BK virus
NIQAISFT

SEQ ID NO: 20976 - protein, 8 aa, BK virus
IQAISFTK

SEQ ID NO: 20977 - protein, 8 aa, BK virus
QAISFTKR

SEQ ID NO: 20978 - protein, 8 aa, BK virus
AISFTKRP

SEQ ID NO: 20979 - protein, 8 aa, BK virus
ISFTKRPH

SEQ ID NO: 20980 - protein, 8 aa, BK virus
SFTKRPHT

SEQ ID NO: 20981 - protein, 8 aa, BK virus
FTKRPHTL

SEQ ID NO: 20982 - protein, 8 aa, BK virus
TKRPHTLF

SEQ ID NO: 20983 - protein, 8 aa, BK virus
KRPHTLFI

SEQ ID NO: 20984 - protein, 8 aa, BK virus
QHCGSCVG

SEQ ID NO: 20985 - protein, 8 aa, BK virus
HCGSCVGH

SEQ ID NO: 20986 - protein, 8 aa, BK virus
CGSCVGHM

SEQ ID NO: 20987 - protein, 8 aa, BK virus
GSCVGHMK

SEQ ID NO: 20988 - protein, 8 aa, BK virus
SCVGHMKY

SEQ ID NO: 20989 - protein, 8 aa, BK virus
CVGHMKYW

SEQ ID NO: 20990 - protein, 8 aa, BK virus
VGHMKYWG

SEQ ID NO: 20991 - protein, 8 aa, BK virus
GHMKYWGN

SEQ ID NO: 20992 - protein, 8 aa, BK virus
HMKYWGNI

SEQ ID NO: 20993 - protein, 8 aa, BK virus
MKYWGNIF

SEQ ID NO: 20994 - protein, 8 aa, BK virus
KYWGNIFP

SEQ ID NO: 20995 - protein, 8 aa, BK virus
YWGNIFPS

SEQ ID NO: 20996 - protein, 8 aa, BK virus
WGNIFPSC

SEQ ID NO: 20997 - protein, 8 aa, BK virus
GNIFPSCE

SEQ ID NO: 20998 - protein, 8 aa, BK virus
NIFPSCES

SEQ ID NO: 20999 - protein, 8 aa, BK virus
IFPSCESP

SEQ ID NO: 21000 - protein, 8 aa, BK virus
FPSCESPK

SEQ ID NO: 21001 - protein, 8 aa, BK virus
PSCESPKI

SEQ ID NO: 21002 - protein, 8 aa, BK virus
SCESPKIP

SEQ ID NO: 21003 - protein, 8 aa, BK virus
CESPKIPS

SEQ ID NO: 21004 - protein, 8 aa, BK virus
ESPKIPSI

SEQ ID NO: 21005 - protein, 8 aa, BK virus
SPKIPSIF

SEQ ID NO: 21006 - protein, 8 aa, BK virus
PKIPSIFI

SEQ ID NO: 21007 - protein, 8 aa, BK virus
KIPSIFIS

SEQ ID NO: 21008 - protein, 8 aa, BK virus
IPSIFIST

SEQ ID NO: 21009 - protein, 8 aa, BK virus
PSIFISTG

SEQ ID NO: 21010 - protein, 8 aa, BK virus
SIFISTGI

SEQ ID NO: 21011 - protein, 8 aa, BK virus
IFISTGIR

SEQ ID NO: 21012 - protein, 8 aa, BK virus
FISTGIRY

SEQ ID NO: 21013 - protein, 8 aa, BK virus
ISTGIRYP

SEQ ID NO: 21014 - protein, 8 aa, BK virus
STGIRYPA

SEQ ID NO: 21015 - protein, 8 aa, BK virus
TGIRYPAL

SEQ ID NO: 21016 - protein, 8 aa, BK virus
GIRYPALN

SEQ ID NO: 21017 - protein, 8 aa, BK virus
IRYPALNW

SEQ ID NO: 21018 - protein, 8 aa, BK virus
RYPALNWI

SEQ ID NO: 21019 - protein, 8 aa, BK virus
YPALNWIS

SEQ ID NO: 21020 - protein, 8 aa, BK virus
PALNWISI

SEQ ID NO: 21021 - protein, 8 aa, BK virus
ALNWISIV

SEQ ID NO: 21022 - protein, 8 aa, BK virus
LNWISIVF

SEQ ID NO: 21023 - protein, 8 aa, BK virus
NWISIVFV

SEQ ID NO: 21024 - protein, 8 aa, BK virus
WISIVFVQ

SEQ ID NO: 21025 - protein, 8 aa, BK virus
ISIVFVQI

SEQ ID NO: 21026 - protein, 8 aa, BK virus
SIVFVQIG

SEQ ID NO: 21027 - protein, 8 aa, BK virus
IVFVQIGL

SEQ ID NO: 21028 - protein, 8 aa, BK virus
VFVQIGLM

SEQ ID NO: 21029 - protein, 8 aa, BK virus
FVQIGLMV

SEQ ID NO: 21030 - protein, 8 aa, BK virus
VQIGLMVS

SEQ ID NO: 21031 - protein, 8 aa, BK virus
QIGLMVSI

SEQ ID NO: 21032 - protein, 8 aa, BK virus
IGLMVSIH

SEQ ID NO: 21033 - protein, 8 aa, BK virus
GLMVSIHY

SEQ ID NO: 21034 - protein, 8 aa, BK virus
LMVSIHYL

SEQ ID NO: 21035 - protein, 8 aa, BK virus
MVSIHYLG

SEQ ID NO: 21036 - protein, 8 aa, BK virus
VSIHYLGL

SEQ ID NO: 21037 - protein, 8 aa, BK virus
SIHYLGLG

SEQ ID NO: 21038 - protein, 8 aa, BK virus
IHYLGLGC

SEQ ID NO: 21039 - protein, 8 aa, BK virus
HYLGLGCW

SEQ ID NO: 21040 - protein, 8 aa, BK virus
YLGLGCWV

SEQ ID NO: 21041 - protein, 8 aa, BK virus
LGLGCWVF

SEQ ID NO: 21042 - protein, 8 aa, BK virus
GLGCWVFR

SEQ ID NO: 21043 - protein, 8 aa, BK virus
LGCWVFRG

SEQ ID NO: 21044 - protein, 8 aa, BK virus
GCWVFRGY

SEQ ID NO: 21045 - protein, 8 aa, BK virus
CWVFRGYS

SEQ ID NO: 21046 - protein, 8 aa, BK virus
WVFRGYST

SEQ ID NO: 21047 - protein, 8 aa, BK virus
VFRGYSTI

SEQ ID NO: 21048 - protein, 8 aa, BK virus
FRGYSTIR

SEQ ID NO: 21049 - protein, 8 aa, BK virus
RGYSTIRV

SEQ ID NO: 21050 - protein, 8 aa, BK virus
GYSTIRVL

SEQ ID NO: 21051 - protein, 8 aa, BK virus
HSLHFQGF

SEQ ID NO: 21052 - protein, 8 aa, BK virus
SLHFQGFS

SEQ ID NO: 21053 - protein, 8 aa, BK virus
LHFQGFST

SEQ ID NO: 21054 - protein, 8 aa, BK virus
HFQGFSTY

SEQ ID NO: 21055 - protein, 8 aa, BK virus
FQGFSTYS

SEQ ID NO: 21056 - protein, 8 aa, BK virus
QGFSTYSK

SEQ ID NO: 21057 - protein, 8 aa, BK virus
GFSTYSKE

SEQ ID NO: 21058 - protein, 8 aa, BK virus
FSTYSKEV

SEQ ID NO: 21059 - protein, 8 aa, BK virus
STYSKEVE

SEQ ID NO: 21060 - protein, 8 aa, BK virus
TYSKEVEI

SEQ ID NO: 21061 - protein, 8 aa, BK virus
YSKEVEIT

SEQ ID NO: 21062 - protein, 8 aa, BK virus
SKEVEITA

SEQ ID NO: 21063 - protein, 8 aa, BK virus
KEVEITAL

SEQ ID NO: 21064 - protein, 8 aa, BK virus
EVEITALN

SEQ ID NO: 21065 - protein, 8 aa, BK virus
VEITALNR

SEQ ID NO: 21066 - protein, 8 aa, BK virus
EITALNRF

SEQ ID NO: 21067 - protein, 8 aa, BK virus
ITALNRFS

SEQ ID NO: 21068 - protein, 8 aa, BK virus
TALNRFSS

SEQ ID NO: 21069 - protein, 8 aa, BK virus
ALNRFSST

SEQ ID NO: 21070 - protein, 8 aa, BK virus
LNRFSSTM

SEQ ID NO: 21071 - protein, 8 aa, BK virus
NRFSSTML

SEQ ID NO: 21072 - protein, 8 aa, BK virus
RFSSTMLM

SEQ ID NO: 21073 - protein, 8 aa, BK virus
FSSTMLMH

SEQ ID NO: 21074 - protein, 8 aa, BK virus
SSTMLMHF

SEQ ID NO: 21075 - protein, 8 aa, BK virus
STMLMHFL

SEQ ID NO: 21076 - protein, 8 aa, BK virus
PCMKVKHA

SEQ ID NO: 21077 - protein, 8 aa, BK virus
CMKVKHAS

SEQ ID NO: 21078 - protein, 8 aa, BK virus
MKVKHASY

SEQ ID NO: 21079 - protein, 8 aa, BK virus
KVKHASYS

SEQ ID NO: 21080 - protein, 8 aa, BK virus
VKHASYSN

SEQ ID NO: 21081 - protein, 8 aa, BK virus
KHASYSNN

SEQ ID NO: 21082 - protein, 8 aa, BK virus
HASYSNNL

SEQ ID NO: 21083 - protein, 8 aa, BK virus
ASYSNNLC

SEQ ID NO: 21084 - protein, 8 aa, BK virus
SYSNNLCL

SEQ ID NO: 21085 - protein, 8 aa, BK virus
YSNNLCLY

SEQ ID NO: 21086 - protein, 8 aa, BK virus
SNNLCLYS

SEQ ID NO: 21087 - protein, 8 aa, BK virus
NNLCLYSY

SEQ ID NO: 21088 - protein, 8 aa, BK virus
NLCLYSYS

SEQ ID NO: 21089 - protein, 8 aa, BK virus
LCLYSYSL

SEQ ID NO: 21090 - protein, 8 aa, BK virus
CLYSYSLP

SEQ ID NO: 21091 - protein, 8 aa, BK virus
LYSYSLPH

SEQ ID NO: 21092 - protein, 8 aa, BK virus
YSYSLPHQ

SEQ ID NO: 21093 - protein, 8 aa, BK virus
IGEGNSCC

SEQ ID NO: 21094 - protein, 8 aa, BK virus
GEGNSCCA

SEQ ID NO: 21095 - protein, 8 aa, BK virus
EGNSCCAV

SEQ ID NO: 21096 - protein, 8 aa, BK virus
GNSCCAVT

SEQ ID NO: 21097 - protein, 8 aa, BK virus
NSCCAVTG

SEQ ID NO: 21098 - protein, 8 aa, BK virus
SCCAVTGK

SEQ ID NO: 21099 - protein, 8 aa, BK virus
CCAVTGKH

SEQ ID NO: 21100 - protein, 8 aa, BK virus
CAVTGKHF

SEQ ID NO: 21101 - protein, 8 aa, BK virus
AVTGKHFS

SEQ ID NO: 21102 - protein, 8 aa, BK virus
VTGKHFSL

SEQ ID NO: 21103 - protein, 8 aa, BK virus
TGKHFSLW

SEQ ID NO: 21104 - protein, 8 aa, BK virus
GKHFSLWA

SEQ ID NO: 21105 - protein, 8 aa, BK virus
KHFSLWAI

SEQ ID NO: 21106 - protein, 8 aa, BK virus
HFSLWAIT

SEQ ID NO: 21107 - protein, 8 aa, BK virus
FSLWAITA

SEQ ID NO: 21108 - protein, 8 aa, BK virus
SLWAITAK

SEQ ID NO: 21109 - protein, 8 aa, BK virus
LWAITAKV

SEQ ID NO: 21110 - protein, 8 aa, BK virus
WAITAKVI

SEQ ID NO: 21111 - protein, 8 aa, BK virus
AITAKVIF

SEQ ID NO: 21112 - protein, 8 aa, BK virus
ITAKVIFS

SEQ ID NO: 21113 - protein, 8 aa, BK virus
TAKVIFST

SEQ ID NO: 21114 - protein, 8 aa, BK virus
TKAPKVFI

SEQ ID NO: 21115 - protein, 8 aa, BK virus
KAPKVFIW

SEQ ID NO: 21116 - protein, 8 aa, BK virus
APKVFIWI

SEQ ID NO: 21117 - protein, 8 aa, BK virus
PKVFIWIP

SEQ ID NO: 21118 - protein, 8 aa, BK virus
KVFIWIPH

SEQ ID NO: 21119 - protein, 8 aa, BK virus
VFIWIPHF

SEQ ID NO: 21120 - protein, 8 aa, BK virus
FIWIPHFW

SEQ ID NO: 21121 - protein, 8 aa, BK virus
IWIPHFWV

SEQ ID NO: 21122 - protein, 8 aa, BK virus
EAFYLCNS

SEQ ID NO: 21123 - protein, 8 aa, BK virus
AFYLCNSI

SEQ ID NO: 21124 - protein, 8 aa, BK virus
FYLCNSIY

SEQ ID NO: 21125 - protein, 8 aa, BK virus
YLCNSIYP

SEQ ID NO: 21126 - protein, 8 aa, BK virus
LCNSIYPS

SEQ ID NO: 21127 - protein, 8 aa, BK virus
CNSIYPSF

SEQ ID NO: 21128 - protein, 8 aa, BK virus
NSIYPSFN

SEQ ID NO: 21129 - protein, 8 aa, BK virus
SIYPSFNF

SEQ ID NO: 21130 - protein, 8 aa, BK virus
FWHLHGFL

SEQ ID NO: 21131 - protein, 8 aa, BK virus
WHLHGFLW

SEQ ID NO: 21132 - protein, 8 aa, BK virus
HLHGFLWL

SEQ ID NO: 21133 - protein, 8 aa, BK virus
LHGFLWLF

SEQ ID NO: 21134 - protein, 8 aa, BK virus
HGFLWLFG

SEQ ID NO: 21135 - protein, 8 aa, BK virus
GFLWLFGS

SEQ ID NO: 21136 - protein, 8 aa, BK virus
FLWLFGSC

SEQ ID NO: 21137 - protein, 8 aa, BK virus
LWLFGSCP

SEQ ID NO: 21138 - protein, 8 aa, BK virus
WLFGSCPW

SEQ ID NO: 21139 - protein, 8 aa, BK virus
LFGSCPWT

SEQ ID NO: 21140 - protein, 8 aa, BK virus
FGSCPWTL

SEQ ID NO: 21141 - protein, 8 aa, BK virus
GSCPWTLS

SEQ ID NO: 21142 - protein, 8 aa, BK virus
SCPWTLSF

SEQ ID NO: 21143 - protein, 8 aa, BK virus
CPWTLSFS

SEQ ID NO: 21144 - protein, 8 aa, BK virus
PWTLSFSF

SEQ ID NO: 21145 - protein, 8 aa, BK virus
WTLSFSFG

SEQ ID NO: 21146 - protein, 8 aa, BK virus
TLSFSFGW

SEQ ID NO: 21147 - protein, 8 aa, BK virus
LSFSFGWG

SEQ ID NO: 21148 - protein, 8 aa, BK virus
SFSFGWGH

SEQ ID NO: 21149 - protein, 8 aa, BK virus
FSFGWGHL

SEQ ID NO: 21150 - protein, 8 aa, BK virus
SFGWGHLH

SEQ ID NO: 21151 - protein, 8 aa, BK virus
FGWGHLHM

SEQ ID NO: 21152 - protein, 8 aa, BK virus
GWGHLHML

SEQ ID NO: 21153 - protein, 8 aa, BK virus
WGHLHMLQ

SEQ ID NO: 21154 - protein, 8 aa, BK virus
GHLHMLQE

SEQ ID NO: 21155 - protein, 8 aa, BK virus
HLHMLQEQ

SEQ ID NO: 21156 - protein, 8 aa, BK virus
LHMLQEQV

SEQ ID NO: 21157 - protein, 8 aa, BK virus
HMLQEQVL

SEQ ID NO: 21158 - protein, 8 aa, BK virus
MLQEQVLQ

SEQ ID NO: 21159 - protein, 8 aa, BK virus
LQEQVLQS

SEQ ID NO: 21160 - protein, 8 aa, BK virus
QEQVLQSR

SEQ ID NO: 21161 - protein, 8 aa, BK virus
EQVLQSRT

SEQ ID NO: 21162 - protein, 8 aa, BK virus
QVLQSRTG

SEQ ID NO: 21163 - protein, 8 aa, BK virus
VLQSRTGL

SEQ ID NO: 21164 - protein, 8 aa, BK virus
LQSRTGLE

SEQ ID NO: 21165 - protein, 8 aa, BK virus
QSRTGLEV

SEQ ID NO: 21166 - protein, 8 aa, BK virus
SRTGLEVK

SEQ ID NO: 21167 - protein, 8 aa, BK virus
RTGLEVKA

SEQ ID NO: 21168 - protein, 8 aa, BK virus
TGLEVKAT

SEQ ID NO: 21169 - protein, 8 aa, BK virus
GLEVKATS

SEQ ID NO: 21170 - protein, 8 aa, BK virus
LEVKATSI

SEQ ID NO: 21171 - protein, 8 aa, BK virus
EVKATSIE

SEQ ID NO: 21172 - protein, 8 aa, BK virus
VKATSIEE

SEQ ID NO: 21173 - protein, 8 aa, BK virus
KATSIEEQ

SEQ ID NO: 21174 - protein, 8 aa, BK virus
ATSIEEQF

SEQ ID NO: 21175 - protein, 8 aa, BK virus
TSIEEQFF

SEQ ID NO: 21176 - protein, 8 aa, BK virus
SIEEQFFD

SEQ ID NO: 21177 - protein, 8 aa, BK virus
TLLNVHFV

SEQ ID NO: 21178 - protein, 8 aa, BK virus
LLNVHFVD

SEQ ID NO: 21179 - protein, 8 aa, BK virus
LNVHFVDF

SEQ ID NO: 21180 - protein, 8 aa, BK virus
NVHFVDFL

SEQ ID NO: 21181 - protein, 8 aa, BK virus
VHFVDFLS

SEQ ID NO: 21182 - protein, 8 aa, BK virus
HFVDFLSP

SEQ ID NO: 21183 - protein, 8 aa, BK virus
FVDFLSPF

SEQ ID NO: 21184 - protein, 8 aa, BK virus
VDFLSPFF

SEQ ID NO: 21185 - protein, 8 aa, BK virus
DFLSPFFV

SEQ ID NO: 21186 - protein, 8 aa, BK virus
LLLYCQHH

SEQ ID NO: 21187 - protein, 8 aa, BK virus
LLYCQHHL

SEQ ID NO: 21188 - protein, 8 aa, BK virus
LYCQHHLY

SEQ ID NO: 21189 - protein, 8 aa, BK virus
YCQHHLYY

SEQ ID NO: 21190 - protein, 8 aa, BK virus
CQHHLYYK

SEQ ID NO: 21191 - protein, 8 aa, BK virus
QHHLYYKY

SEQ ID NO: 21192 - protein, 8 aa, BK virus
HHLYYKYG

SEQ ID NO: 21193 - protein, 8 aa, BK virus
HLYYKYGQ

SEQ ID NO: 21194 - protein, 8 aa, BK virus
LYYKYGQN

SEQ ID NO: 21195 - protein, 8 aa, BK virus
YYKYGQNV

SEQ ID NO: 21196 - protein, 8 aa, BK virus
YKYGQNVH

SEQ ID NO: 21197 - protein, 8 aa, BK virus
KYGQNVHG

SEQ ID NO: 21198 - protein, 8 aa, BK virus
YGQNVHGY

SEQ ID NO: 21199 - protein, 8 aa, BK virus
GQNVHGYL

SEQ ID NO: 21200 - protein, 8 aa, BK virus
QNVHGYLP

SEQ ID NO: 21201 - protein, 8 aa, BK virus
NVHGYLPF

SEQ ID NO: 21202 - protein, 8 aa, BK virus
VHGYLPFQ

SEQ ID NO: 21203 - protein, 8 aa, BK virus
HGYLPFQL

SEQ ID NO: 21204 - protein, 8 aa, BK virus
GYLPFQLL

SEQ ID NO: 21205 - protein, 8 aa, BK virus
YLPFQLLV

SEQ ID NO: 21206 - protein, 8 aa, BK virus
GKDQNNIV

SEQ ID NO: 21207 - protein, 8 aa, BK virus
KDQNNIVE

SEQ ID NO: 21208 - protein, 8 aa, BK virus
DQNNIVEY

SEQ ID NO: 21209 - protein, 8 aa, BK virus
QNNIVEYN

SEQ ID NO: 21210 - protein, 8 aa, BK virus
NNIVEYNY

SEQ ID NO: 21211 - protein, 8 aa, BK virus
NIVEYNYK

SEQ ID NO: 21212 - protein, 8 aa, BK virus
IVEYNYKS

SEQ ID NO: 21213 - protein, 8 aa, BK virus
VEYNYKSL

SEQ ID NO: 21214 - protein, 8 aa, BK virus
KIFLFFSA

SEQ ID NO: 21215 - protein, 8 aa, BK virus
IFLFFSAI

SEQ ID NO: 21216 - protein, 8 aa, BK virus
FLFFSAIP

SEQ ID NO: 21217 - protein, 8 aa, BK virus
LFFSAIPV

SEQ ID NO: 21218 - protein, 8 aa, BK virus
FFSAIPVR

SEQ ID NO: 21219 - protein, 8 aa, BK virus
FSAIPVRL

SEQ ID NO: 21220 - protein, 8 aa, BK virus
QTKKDPNA

SEQ ID NO: 21221 - protein, 8 aa, BK virus
QKYLHQET

SEQ ID NO: 21222 - protein, 8 aa, BK virus
KYLHQETE

SEQ ID NO: 21223 - protein, 8 aa, BK virus
YLHQETEY

SEQ ID NO: 21224 - protein, 8 aa, BK virus
LHQETEYH

SEQ ID NO: 21225 - protein, 8 aa, BK virus
HQETEYHS

SEQ ID NO: 21226 - protein, 8 aa, BK virus
QETEYHST

SEQ ID NO: 21227 - protein, 8 aa, BK virus
ETEYHSTH

SEQ ID NO: 21228 - protein, 8 aa, BK virus
TEYHSTHL

SEQ ID NO: 21229 - protein, 8 aa, BK virus
EYHSTHLG

SEQ ID NO: 21230 - protein, 8 aa, BK virus
TIPKPCLI

SEQ ID NO: 21231 - protein, 8 aa, BK virus
IPKPCLIA

SEQ ID NO: 21232 - protein, 8 aa, BK virus
PKPCLIAD

SEQ ID NO: 21233 - protein, 8 aa, BK virus
KPCLIADR

SEQ ID NO: 21234 - protein, 8 aa, BK virus
PCLIADRG

SEQ ID NO: 21235 - protein, 8 aa, BK virus
CLIADRGL

SEQ ID NO: 21236 - protein, 8 aa, BK virus
LIADRGLQ

SEQ ID NO: 21237 - protein, 8 aa, BK virus
IADRGLQW

SEQ ID NO: 21238 - protein, 8 aa, BK virus
ADRGLQWK

SEQ ID NO: 21239 - protein, 8 aa, BK virus
DRGLQWKL

SEQ ID NO: 21240 - protein, 8 aa, BK virus
RGLQWKLC

SEQ ID NO: 21241 - protein, 8 aa, BK virus
GLQWKLCD

SEQ ID NO: 21242 - protein, 8 aa, BK virus
LQWKLCDP

SEQ ID NO: 21243 - protein, 8 aa, BK virus
QWKLCDPN

SEQ ID NO: 21244 - protein, 8 aa, BK virus
WKLCDPNH

SEQ ID NO: 21245 - protein, 8 aa, BK virus
KLCDPNHQ

SEQ ID NO: 21246 - protein, 8 aa, BK virus
LCDPNHQR

SEQ ID NO: 21247 - protein, 8 aa, BK virus
CDPNHQRT

SEQ ID NO: 21248 - protein, 8 aa, BK virus
DPNHQRTY

SEQ ID NO: 21249 - protein, 8 aa, BK virus
PNHQRTYT

SEQ ID NO: 21250 - protein, 8 aa, BK virus
NHQRTYTL

SEQ ID NO: 21251 - protein, 8 aa, BK virus
HQRTYTLL

SEQ ID NO: 21252 - protein, 8 aa, BK virus
QRTYTLLE

SEQ ID NO: 21253 - protein, 8 aa, BK virus
RTYTLLEL

SEQ ID NO: 21254 - protein, 8 aa, BK virus
TYTLLELR

SEQ ID NO: 21255 - protein, 8 aa, BK virus
YTLLELRN

SEQ ID NO: 21256 - protein, 8 aa, BK virus
QFELKQQT

SEQ ID NO: 21257 - protein, 8 aa, BK virus
FELKQQTQ

SEQ ID NO: 21258 - protein, 8 aa, BK virus
ELKQQTQQ

SEQ ID NO: 21259 - protein, 8 aa, BK virus
PQEHQQLQ

SEQ ID NO: 21260 - protein, 8 aa, BK virus
QEHQQLQH

SEQ ID NO: 21261 - protein, 8 aa, BK virus
EHQQLQHM

SEQ ID NO: 21262 - protein, 8 aa, BK virus
HQQLQHMF

SEQ ID NO: 21263 - protein, 8 aa, BK virus
QQLQHMFE

SEQ ID NO: 21264 - protein, 8 aa, BK virus
QLQHMFEE

SEQ ID NO: 21265 - protein, 8 aa, BK virus
LQHMFEEL

SEQ ID NO: 21266 - protein, 8 aa, BK virus
QHMFEELG

SEQ ID NO: 21267 - protein, 8 aa, BK virus
HMFEELGL

SEQ ID NO: 21268 - protein, 8 aa, BK virus
PLRYLLCP

SEQ ID NO: 21269 - protein, 8 aa, BK virus
LRYLLCPL

SEQ ID NO: 21270 - protein, 8 aa, BK virus
RYLLCPLQ

SEQ ID NO: 21271 - protein, 8 aa, BK virus
QGMQFELL

SEQ ID NO: 21272 - protein, 8 aa, BK virus
QQQPPQQQ

SEQ ID NO: 21273 - protein, 8 aa, BK virus
QQPPQQQF

SEQ ID NO: 21274 - protein, 8 aa, BK virus
QPPQQQFQ

SEQ ID NO: 21275 - protein, 8 aa, BK virus
PPQQQFQP

SEQ ID NO: 21276 - protein, 8 aa, BK virus
PQQQFQPL

SEQ ID NO: 21277 - protein, 8 aa, BK virus
QQQFQPLK

SEQ ID NO: 21278 - protein, 8 aa, BK virus
QQFQPLKI

SEQ ID NO: 21279 - protein, 8 aa, BK virus
QFQPLKIL

SEQ ID NO: 21280 - protein, 8 aa, BK virus
FQPLKILW

SEQ ID NO: 21281 - protein, 8 aa, BK virus
QPLKILWQ

SEQ ID NO: 21282 - protein, 8 aa, BK virus
PLKILWQQ

SEQ ID NO: 21283 - protein, 8 aa, BK virus
LKILWQQQ

SEQ ID NO: 21284 - protein, 8 aa, BK virus
KILWQQQP

SEQ ID NO: 21285 - protein, 8 aa, BK virus
ILWQQQPQ

SEQ ID NO: 21286 - protein, 8 aa, BK virus
LWQQQPQI

SEQ ID NO: 21287 - protein, 8 aa, BK virus
WQQQPQIH

SEQ ID NO: 21288 - protein, 8 aa, BK virus
QQQPQIHW

SEQ ID NO: 21289 - protein, 8 aa, BK virus
QQPQIHWQ

SEQ ID NO: 21290 - protein, 8 aa, BK virus
QPQIHWQL

SEQ ID NO: 21291 - protein, 8 aa, BK virus
PQIHWQLG

SEQ ID NO: 21292 - protein, 8 aa, BK virus
QIHWQLGP

SEQ ID NO: 21293 - protein, 8 aa, BK virus
IHWQLGPP

SEQ ID NO: 21294 - protein, 8 aa, BK virus
HWQLGPPK

SEQ ID NO: 21295 - protein, 8 aa, BK virus
WQLGPPKV

SEQ ID NO: 21296 - protein, 8 aa, BK virus
QLGPPKVL

SEQ ID NO: 21297 - protein, 8 aa, BK virus
LGPPKVLE

SEQ ID NO: 21298 - protein, 8 aa, BK virus
GPPKVLEQ

SEQ ID NO: 21299 - protein, 8 aa, BK virus
PPKVLEQH

SEQ ID NO: 21300 - protein, 8 aa, BK virus
PKVLEQHP

SEQ ID NO: 21301 - protein, 8 aa, BK virus
TWKYKKKG

SEQ ID NO: 21302 - protein, 8 aa, BK virus
WKYKKKGI

SEQ ID NO: 21303 - protein, 8 aa, BK virus
KYKKKGIT

SEQ ID NO: 21304 - protein, 8 aa, BK virus
YKKKGITY

SEQ ID NO: 21305 - protein, 8 aa, BK virus
KKKGITYL

SEQ ID NO: 21306 - protein, 8 aa, BK virus
KKGITYLG

SEQ ID NO: 21307 - protein, 8 aa, BK virus
KGITYLGV

SEQ ID NO: 21308 - protein, 8 aa, BK virus
GITYLGVF

SEQ ID NO: 21309 - protein, 8 aa, BK virus
ITYLGVFY

SEQ ID NO: 21310 - protein, 8 aa, BK virus
TYLGVFYR

SEQ ID NO: 21311 - protein, 8 aa, BK virus
YLGVFYRV

SEQ ID NO: 21312 - protein, 8 aa, BK virus
LGVFYRVF

SEQ ID NO: 21313 - protein, 8 aa, BK virus
GVFYRVFY

SEQ ID NO: 21314 - protein, 8 aa, BK virus
VFYRVFYS

SEQ ID NO: 21315 - protein, 8 aa, BK virus
FYRVFYSR

SEQ ID NO: 21316 - protein, 8 aa, BK virus
SSGTFVFP

SEQ ID NO: 21317 - protein, 8 aa, BK virus
SGTFVFPV

SEQ ID NO: 21318 - protein, 8 aa, BK virus
GTFVFPVY

SEQ ID NO: 21319 - protein, 8 aa, BK virus
TFVFPVYT

SEQ ID NO: 21320 - protein, 8 aa, BK virus
FVFPVYTV

SEQ ID NO: 21321 - protein, 8 aa, BK virus
VFPVYTVF

SEQ ID NO: 21322 - protein, 8 aa, BK virus
FPVYTVFT

SEQ ID NO: 21323 - protein, 8 aa, BK virus
PVYTVFTS

SEQ ID NO: 21324 - protein, 8 aa, BK virus
VYTVFTST

SEQ ID NO: 21325 - protein, 8 aa, BK virus
YTVFTSTK

SEQ ID NO: 21326 - protein, 8 aa, BK virus
TVFTSTKF

SEQ ID NO: 21327 - protein, 8 aa, BK virus
VFTSTKFQ

SEQ ID NO: 21328 - protein, 8 aa, BK virus
FTSTKFQQ

SEQ ID NO: 21329 - protein, 8 aa, BK virus
TSTKFQQK

SEQ ID NO: 21330 - protein, 8 aa, BK virus
STKFQQKL

SEQ ID NO: 21331 - protein, 8 aa, BK virus
NKNKNPLS

SEQ ID NO: 21332 - protein, 8 aa, BK virus
KNKNPLSS

SEQ ID NO: 21333 - protein, 8 aa, BK virus
NKNPLSSF

SEQ ID NO: 21334 - protein, 8 aa, BK virus
KNPLSSFF

SEQ ID NO: 21335 - protein, 8 aa, BK virus
NPLSSFFC

SEQ ID NO: 21336 - protein, 8 aa, BK virus
PLSSFFCS

SEQ ID NO: 21337 - protein, 8 aa, BK virus
LSSFFCSS

SEQ ID NO: 21338 - protein, 8 aa, BK virus
SSFFCSSP

SEQ ID NO: 21339 - protein, 8 aa, BK virus
SFFCSSPG

SEQ ID NO: 21340 - protein, 8 aa, BK virus
FFCSSPGF

SEQ ID NO: 21341 - protein, 8 aa, BK virus
FCSSPGFT

SEQ ID NO: 21342 - protein, 8 aa, BK virus
CSSPGFTN

SEQ ID NO: 21343 - protein, 8 aa, BK virus
SSPGFTNF

SEQ ID NO: 21344 - protein, 8 aa, BK virus
SPGFTNFH

SEQ ID NO: 21345 - protein, 8 aa, BK virus
QLAQNHGL

SEQ ID NO: 21346 - protein, 8 aa, BK virus
LAQNHGLC

SEQ ID NO: 21347 - protein, 8 aa, BK virus
AQNHGLCP

SEQ ID NO: 21348 - protein, 8 aa, BK virus
QNHGLCPV

SEQ ID NO: 21349 - protein, 8 aa, BK virus
LGTRPRFL

SEQ ID NO: 21350 - protein, 8 aa, BK virus
GTRPRFLG

SEQ ID NO: 21351 - protein, 8 aa, BK virus
TRPRFLGS

SEQ ID NO: 21352 - protein, 8 aa, BK virus
RPRFLGSQ

SEQ ID NO: 21353 - protein, 8 aa, BK virus
PRFLGSQN

SEQ ID NO: 21354 - protein, 8 aa, BK virus
RFLGSQNM

SEQ ID NO: 21355 - protein, 8 aa, BK virus
FLGSQNMS

SEQ ID NO: 21356 - protein, 8 aa, BK virus
LGSQNMSV

SEQ ID NO: 21357 - protein, 8 aa, BK virus
GSQNMSVM

SEQ ID NO: 21358 - protein, 8 aa, BK virus
SQNMSVMH

SEQ ID NO: 21359 - protein, 8 aa, BK virus
QNMSVMHF

SEQ ID NO: 21360 - protein, 8 aa, BK virus
NMSVMHFP

SEQ ID NO: 21361 - protein, 8 aa, BK virus
MSVMHFPS

SEQ ID NO: 21362 - protein, 8 aa, BK virus
GHGLAAFH

SEQ ID NO: 21363 - protein, 8 aa, BK virus
HGLAAFHG

SEQ ID NO: 21364 - protein, 8 aa, BK virus
AAPPCESC

SEQ ID NO: 21365 - protein, 8 aa, BK virus
APPCESCT

SEQ ID NO: 21366 - protein, 8 aa, BK virus
PPCESCTF

SEQ ID NO: 21367 - protein, 8 aa, BK virus
PCESCTFL

SEQ ID NO: 21368 - protein, 8 aa, BK virus
CESCTFLP

SEQ ID NO: 21369 - protein, 8 aa, BK virus
ESCTFLPE

SEQ ID NO: 21370 - protein, 8 aa, BK virus
SCTFLPEV

SEQ ID NO: 21371 - protein, 8 aa, BK virus
CTFLPEVM

SEQ ID NO: 21372 - protein, 8 aa, BK virus
TFLPEVMV

SEQ ID NO: 21373 - protein, 8 aa, BK virus
FLPEVMVW

SEQ ID NO: 21374 - protein, 8 aa, BK virus
LPEVMVWL

SEQ ID NO: 21375 - protein, 8 aa, BK virus
PEVMVWLH

SEQ ID NO: 21376 - protein, 8 aa, BK virus
EVMVWLHS

SEQ ID NO: 21377 - protein, 8 aa, BK virus
VMVWLHSP

SEQ ID NO: 21378 - protein, 8 aa, BK virus
MVWLHSPV

SEQ ID NO: 21379 - protein, 8 aa, BK virus
VWLHSPVS

SEQ ID NO: 21380 - protein, 8 aa, BK virus
WLHSPVSH

SEQ ID NO: 21381 - protein, 8 aa, BK virus
LHSPVSHA

SEQ ID NO: 21382 - protein, 8 aa, BK virus
HSPVSHAL

SEQ ID NO: 21383 - protein, 8 aa, BK virus
SPVSHALS

SEQ ID NO: 21384 - protein, 8 aa, BK virus
PVSHALSF

SEQ ID NO: 21385 - protein, 8 aa, BK virus
VSHALSFL

SEQ ID NO: 21386 - protein, 8 aa, BK virus
SHALSFLR

SEQ ID NO: 21387 - protein, 8 aa, BK virus
HALSFLRS

SEQ ID NO: 21388 - protein, 8 aa, BK virus
ALSFLRSW

SEQ ID NO: 21389 - protein, 8 aa, BK virus
LSFLRSWF

SEQ ID NO: 21390 - protein, 8 aa, BK virus
SFLRSWFG

SEQ ID NO: 21391 - protein, 8 aa, BK virus
FLRSWFGC

SEQ ID NO: 21392 - protein, 8 aa, BK virus
LRSWFGCI

SEQ ID NO: 21393 - protein, 8 aa, BK virus
RSWFGCIP

SEQ ID NO: 21394 - protein, 8 aa, BK virus
SWFGCIPW

SEQ ID NO: 21395 - protein, 8 aa, BK virus
WFGCIPWV

SEQ ID NO: 21396 - protein, 8 aa, BK virus
FGCIPWVS

SEQ ID NO: 21397 - protein, 8 aa, BK virus
GCIPWVSS

SEQ ID NO: 21398 - protein, 8 aa, BK virus
CIPWVSSS

SEQ ID NO: 21399 - protein, 8 aa, BK virus
IPWVSSSS

SEQ ID NO: 21400 - protein, 8 aa, BK virus
PWVSSSSL

SEQ ID NO: 21401 - protein, 8 aa, BK virus
WVSSSSLW

SEQ ID NO: 21402 - protein, 8 aa, BK virus
VSSSSLWP

SEQ ID NO: 21403 - protein, 8 aa, BK virus
SSSSLWPF

SEQ ID NO: 21404 - protein, 8 aa, BK virus
SSSLWPFF

SEQ ID NO: 21405 - protein, 8 aa, BK virus
SSLWPFFL

SEQ ID NO: 21406 - protein, 8 aa, BK virus
YIRGRGRL

SEQ ID NO: 21407 - protein, 8 aa, BK virus
IRGRGRLC

SEQ ID NO: 21408 - protein, 8 aa, BK virus
RGRGRLCL

SEQ ID NO: 21409 - protein, 8 aa, BK virus
GRGRLCLH

SEQ ID NO: 21410 - protein, 8 aa, BK virus
RGRLCLHP

SEQ ID NO: 21411 - protein, 8 aa, BK virus
GRLCLHPF

SEQ ID NO: 21412 - protein, 8 aa, BK virus
RLCLHPFS

SEQ ID NO: 21413 - protein, 8 aa, BK virus
LCLHPFSQ

SEQ ID NO: 21414 - protein, 8 aa, BK virus
CLHPFSQV

SEQ ID NO: 21415 - protein, 8 aa, BK virus
LHPFSQVV

SEQ ID NO: 21416 - protein, 8 aa, BK virus
HPFSQVVR

SEQ ID NO: 21417 - protein, 8 aa, BK virus
PFSQVVRV

SEQ ID NO: 21418 - protein, 8 aa, BK virus
FSQVVRVW

SEQ ID NO: 21419 - protein, 8 aa, BK virus
SQVVRVWR

SEQ ID NO: 21420 - protein, 8 aa, BK virus
QVVRVWRL

SEQ ID NO: 21421 - protein, 8 aa, BK virus
VVRVWRLF

SEQ ID NO: 21422 - protein, 8 aa, BK virus
VRVWRLFL

SEQ ID NO: 21423 - protein, 8 aa, BK virus
RVWRLFLR

SEQ ID NO: 21424 - protein, 8 aa, BK virus
VWRLFLRP

SEQ ID NO: 21425 - protein, 8 aa, BK virus
WRLFLRPS

SEQ ID NO: 21426 - protein, 8 aa, BK virus
RLFLRPSK

SEQ ID NO: 21427 - protein, 8 aa, BK virus
LFLRPSKT

SEQ ID NO: 21428 - protein, 8 aa, BK virus
FLRPSKTI

SEQ ID NO: 21429 - protein, 8 aa, BK virus
LRPSKTIW

SEQ ID NO: 21430 - protein, 8 aa, BK virus
RPSKTIWG

SEQ ID NO: 21431 - protein, 8 aa, BK virus
PSKTIWGN

SEQ ID NO: 21432 - protein, 8 aa, BK virus
SKTIWGNP

SEQ ID NO: 21433 - protein, 8 aa, BK virus
KTIWGNPY

SEQ ID NO: 21434 - protein, 8 aa, BK virus
TIWGNPYS

SEQ ID NO: 21435 - protein, 8 aa, BK virus
IWGNPYSF

SEQ ID NO: 21436 - protein, 8 aa, BK virus
WGNPYSFA

SEQ ID NO: 21437 - protein, 8 aa, BK virus
GNPYSFAI

SEQ ID NO: 21438 - protein, 8 aa, BK virus
NPYSFAIF

SEQ ID NO: 21439 - protein, 8 aa, BK virus
PYSFAIFA

SEQ ID NO: 21440 - protein, 8 aa, BK virus
YSFAIFAK

SEQ ID NO: 21441 - protein, 9 aa, BK virus
QGRIHGAHG

SEQ ID NO: 21442 - protein, 9 aa, BK virus
GRIHGAHGP

SEQ ID NO: 21443 - protein, 9 aa, BK virus
RIHGAHGPF

SEQ ID NO: 21444 - protein, 9 aa, BK virus
IHGAHGPFR

SEQ ID NO: 21445 - protein, 9 aa, BK virus
HGAHGPFRP

SEQ ID NO: 21446 - protein, 9 aa, BK virus
KSCLGKSSL

SEQ ID NO: 21447 - protein, 9 aa, BK virus
SCLGKSSLN

SEQ ID NO: 21448 - protein, 9 aa, BK virus
CLGKSSLNE

SEQ ID NO: 21449 - protein, 9 aa, BK virus
LGKSSLNEK

SEQ ID NO: 21450 - protein, 9 aa, BK virus
GKSSLNEKS

SEQ ID NO: 21451 - protein, 9 aa, BK virus
KSSLNEKSL

SEQ ID NO: 21452 - protein, 9 aa, BK virus
SSLNEKSLF

SEQ ID NO: 21453 - protein, 9 aa, BK virus
SLNEKSLFK

SEQ ID NO: 21454 - protein, 9 aa, BK virus
LNEKSLFKE

SEQ ID NO: 21455 - protein, 9 aa, BK virus
NEKSLFKEV

SEQ ID NO: 21456 - protein, 9 aa, BK virus
KNGAGCKGS

SEQ ID NO: 21457 - protein, 9 aa, BK virus
NGAGCKGSS

SEQ ID NO: 21458 - protein, 9 aa, BK virus
GAGCKGSSS

SEQ ID NO: 21459 - protein, 9 aa, BK virus
AGCKGSSSA

SEQ ID NO: 21460 - protein, 9 aa, BK virus
FSSLPRYPV

SEQ ID NO: 21461 - protein, 9 aa, BK virus
SSLPRYPVL

SEQ ID NO: 21462 - protein, 9 aa, BK virus
SLPRYPVLQ

SEQ ID NO: 21463 - protein, 9 aa, BK virus
LPRYPVLQG

SEQ ID NO: 21464 - protein, 9 aa, BK virus
PRYPVLQGM

SEQ ID NO: 21465 - protein, 9 aa, BK virus
RYPVLQGMA

SEQ ID NO: 21466 - protein, 9 aa, BK virus
YPVLQGMAY

SEQ ID NO: 21467 - protein, 9 aa, BK virus
PVLQGMAYL

SEQ ID NO: 21468 - protein, 9 aa, BK virus
VLQGMAYLF

SEQ ID NO: 21469 - protein, 9 aa, BK virus
LQGMAYLFQ

SEQ ID NO: 21470 - protein, 9 aa, BK virus
QGMAYLFQK

SEQ ID NO: 21471 - protein, 9 aa, BK virus
GMAYLFQKA

SEQ ID NO: 21472 - protein, 9 aa, BK virus
MAYLFQKAF

SEQ ID NO: 21473 - protein, 9 aa, BK virus
AYLFQKAFC

SEQ ID NO: 21474 - protein, 9 aa, BK virus
YLFQKAFCA

SEQ ID NO: 21475 - protein, 9 aa, BK virus
LFQKAFCAL

SEQ ID NO: 21476 - protein, 9 aa, BK virus
FQKAFCALP

SEQ ID NO: 21477 - protein, 9 aa, BK virus
QKAFCALPL

SEQ ID NO: 21478 - protein, 9 aa, BK virus
KAFCALPLH

SEQ ID NO: 21479 - protein, 9 aa, BK virus
AFCALPLHA

SEQ ID NO: 21480 - protein, 9 aa, BK virus
FCALPLHAM

SEQ ID NO: 21481 - protein, 9 aa, BK virus
CALPLHAMS

SEQ ID NO: 21482 - protein, 9 aa, BK virus
ALPLHAMSA

SEQ ID NO: 21483 - protein, 9 aa, BK virus
KIFKKRALG

SEQ ID NO: 21484 - protein, 9 aa, BK virus
IFKKRALGL

SEQ ID NO: 21485 - protein, 9 aa, BK virus
FKKRALGLD

SEQ ID NO: 21486 - protein, 9 aa, BK virus
KKRALGLDR

SEQ ID NO: 21487 - protein, 9 aa, BK virus
KRALGLDRL

SEQ ID NO: 21488 - protein, 9 aa, BK virus
RALGLDRLL

SEQ ID NO: 21489 - protein, 9 aa, BK virus
ALGLDRLLL

SEQ ID NO: 21490 - protein, 9 aa, BK virus
LGLDRLLLH

SEQ ID NO: 21491 - protein, 9 aa, BK virus
LLHTVVWLR

SEQ ID NO: 21492 - protein, 9 aa, BK virus
LHTVVWLRP

SEQ ID NO: 21493 - protein, 9 aa, BK virus
HTVVWLRPN

SEQ ID NO: 21494 - protein, 9 aa, BK virus
RNSAMVGPN

SEQ ID NO: 21495 - protein, 9 aa, BK virus
NSAMVGPNN

SEQ ID NO: 21496 - protein, 9 aa, BK virus
SAMVGPNNW

SEQ ID NO: 21497 - protein, 9 aa, BK virus
AMVGPNNWR

SEQ ID NO: 21498 - protein, 9 aa, BK virus
MVGPNNWRN

SEQ ID NO: 21499 - protein, 9 aa, BK virus
VGPNNWRNS

SEQ ID NO: 21500 - protein, 9 aa, BK virus
GPNNWRNSL

SEQ ID NO: 21501 - protein, 9 aa, BK virus
PNNWRNSLQ

SEQ ID NO: 21502 - protein, 9 aa, BK virus
NNWRNSLQR

SEQ ID NO: 21503 - protein, 9 aa, BK virus
NWRNSLQRS

SEQ ID NO: 21504 - protein, 9 aa, BK virus
WRNSLQRSK

SEQ ID NO: 21505 - protein, 9 aa, BK virus
RNSLQRSKA

SEQ ID NO: 21506 - protein, 9 aa, BK virus
NSLQRSKAL

SEQ ID NO: 21507 - protein, 9 aa, BK virus
SLQRSKALR

SEQ ID NO: 21508 - protein, 9 aa, BK virus
INNKILKGP

SEQ ID NO: 21509 - protein, 9 aa, BK virus
NNKILKGPK

SEQ ID NO: 21510 - protein, 9 aa, BK virus
VPTYGTEEW

SEQ ID NO: 21511 - protein, 9 aa, BK virus
PTYGTEEWE

SEQ ID NO: 21512 - protein, 9 aa, BK virus
TYGTEEWES

SEQ ID NO: 21513 - protein, 9 aa, BK virus
YGTEEWESW

SEQ ID NO: 21514 - protein, 9 aa, BK virus
GTEEWESWW

SEQ ID NO: 21515 - protein, 9 aa, BK virus
TEEWESWWS

SEQ ID NO: 21516 - protein, 9 aa, BK virus
EEWESWWSS

SEQ ID NO: 21517 - protein, 9 aa, BK virus
EWESWWSSF

SEQ ID NO: 21518 - protein, 9 aa, BK virus
WESWWSSFN

SEQ ID NO: 21519 - protein, 9 aa, BK virus
ESWWSSFNE

SEQ ID NO: 21520 - protein, 9 aa, BK virus
SWWSSFNEK

SEQ ID NO: 21521 - protein, 9 aa, BK virus
WWSSFNEKW

SEQ ID NO: 21522 - protein, 9 aa, BK virus
WSSFNEKWD

SEQ ID NO: 21523 - protein, 9 aa, BK virus
SSFNEKWDE

SEQ ID NO: 21524 - protein, 9 aa, BK virus
SFNEKWDED

SEQ ID NO: 21525 - protein, 9 aa, BK virus
FNEKWDEDL

SEQ ID NO: 21526 - protein, 9 aa, BK virus
NEKWDEDLF

SEQ ID NO: 21527 - protein, 9 aa, BK virus
EKWDEDLFC

SEQ ID NO: 21528 - protein, 9 aa, BK virus
KWDEDLFCH

SEQ ID NO: 21529 - protein, 9 aa, BK virus
WDEDLFCHE

SEQ ID NO: 21530 - protein, 9 aa, BK virus
DEDLFCHED

SEQ ID NO: 21531 - protein, 9 aa, BK virus
EDLFCHEDM

SEQ ID NO: 21532 - protein, 9 aa, BK virus
DLFCHEDMF

SEQ ID NO: 21533 - protein, 9 aa, BK virus
LFCHEDMFA

SEQ ID NO: 21534 - protein, 9 aa, BK virus
FCHEDMFAS

SEQ ID NO: 21535 - protein, 9 aa, BK virus
CHEDMFASD

SEQ ID NO: 21536 - protein, 9 aa, BK virus
HEDMFASDE

SEQ ID NO: 21537 - protein, 9 aa, BK virus
EDMFASDEE

SEQ ID NO: 21538 - protein, 9 aa, BK virus
DMFASDEEA

SEQ ID NO: 21539 - protein, 9 aa, BK virus
MFASDEEAT

SEQ ID NO: 21540 - protein, 9 aa, BK virus
FASDEEATA

SEQ ID NO: 21541 - protein, 9 aa, BK virus
ASDEEATAD

SEQ ID NO: 21542 - protein, 9 aa, BK virus
SDEEATADS

SEQ ID NO: 21543 - protein, 9 aa, BK virus
DEEATADSQ

SEQ ID NO: 21544 - protein, 9 aa, BK virus
EEATADSQH

SEQ ID NO: 21545 - protein, 9 aa, BK virus
EATADSQHS

SEQ ID NO: 21546 - protein, 9 aa, BK virus
ATADSQHST

SEQ ID NO: 21547 - protein, 9 aa, BK virus
TADSQHSTP

SEQ ID NO: 21548 - protein, 9 aa, BK virus
ADSQHSTPP

SEQ ID NO: 21549 - protein, 9 aa, BK virus
DSQHSTPPK

SEQ ID NO: 21550 - protein, 9 aa, BK virus
SQHSTPPKK

SEQ ID NO: 21551 - protein, 9 aa, BK virus
QHSTPPKKK

SEQ ID NO: 21552 - protein, 9 aa, BK virus
HSTPPKKKR

SEQ ID NO: 21553 - protein, 9 aa, BK virus
STPPKKKRK

SEQ ID NO: 21554 - protein, 9 aa, BK virus
TPPKKKRKV

SEQ ID NO: 21555 - protein, 9 aa, BK virus
PPKKKRKVE

SEQ ID NO: 21556 - protein, 9 aa, BK virus
PKKKRKVED

SEQ ID NO: 21557 - protein, 9 aa, BK virus
KKKRKVEDP

SEQ ID NO: 21558 - protein, 9 aa, BK virus
KKRKVEDPK

SEQ ID NO: 21559 - protein, 9 aa, BK virus
KRKVEDPKD

SEQ ID NO: 21560 - protein, 9 aa, BK virus
RKVEDPKDF

SEQ ID NO: 21561 - protein, 9 aa, BK virus
KVEDPKDFP

SEQ ID NO: 21562 - protein, 9 aa, BK virus
VEDPKDFPS

SEQ ID NO: 21563 - protein, 9 aa, BK virus
EDPKDFPSD

SEQ ID NO: 21564 - protein, 9 aa, BK virus
DPKDFPSDL

SEQ ID NO: 21565 - protein, 9 aa, BK virus
PKDFPSDLH

SEQ ID NO: 21566 - protein, 9 aa, BK virus
KDFPSDLHQ

SEQ ID NO: 21567 - protein, 9 aa, BK virus
DFPSDLHQF

SEQ ID NO: 21568 - protein, 9 aa, BK virus
FPSDLHQFL

SEQ ID NO: 21569 - protein, 9 aa, BK virus
PSDLHQFLS

SEQ ID NO: 21570 - protein, 9 aa, BK virus
SDLHQFLSQ

SEQ ID NO: 21571 - protein, 9 aa, BK virus
DLHQFLSQA

SEQ ID NO: 21572 - protein, 9 aa, BK virus
LHQFLSQAV

SEQ ID NO: 21573 - protein, 9 aa, BK virus
HQFLSQAVF

SEQ ID NO: 21574 - protein, 9 aa, BK virus
QFLSQAVFS

SEQ ID NO: 21575 - protein, 9 aa, BK virus
FLSQAVFSN

SEQ ID NO: 21576 - protein, 9 aa, BK virus
LSQAVFSNR

SEQ ID NO: 21577 - protein, 9 aa, BK virus
SQAVFSNRT

SEQ ID NO: 21578 - protein, 9 aa, BK virus
QAVFSNRTL

SEQ ID NO: 21579 - protein, 9 aa, BK virus
AVFSNRTLA

SEQ ID NO: 21580 - protein, 9 aa, BK virus
VFSNRTLAC

SEQ ID NO: 21581 - protein, 9 aa, BK virus
FSNRTLACF

SEQ ID NO: 21582 - protein, 9 aa, BK virus
SNRTLACFA

SEQ ID NO: 21583 - protein, 9 aa, BK virus
NRTLACFAV

SEQ ID NO: 21584 - protein, 9 aa, BK virus
RTLACFAVY

SEQ ID NO: 21585 - protein, 9 aa, BK virus
TLACFAVYT

SEQ ID NO: 21586 - protein, 9 aa, BK virus
LACFAVYTT

SEQ ID NO: 21587 - protein, 9 aa, BK virus
ACFAVYTTK

SEQ ID NO: 21588 - protein, 9 aa, BK virus
CFAVYTTKE

SEQ ID NO: 21589 - protein, 9 aa, BK virus
FAVYTTKEK

SEQ ID NO: 21590 - protein, 9 aa, BK virus
AVYTTKEKA

SEQ ID NO: 21591 - protein, 9 aa, BK virus
VYTTKEKAQ

SEQ ID NO: 21592 - protein, 9 aa, BK virus
YTTKEKAQI

SEQ ID NO: 21593 - protein, 9 aa, BK virus
TTKEKAQIL

SEQ ID NO: 21594 - protein, 9 aa, BK virus
TKEKAQILY

SEQ ID NO: 21595 - protein, 9 aa, BK virus
KEKAQILYK

SEQ ID NO: 21596 - protein, 9 aa, BK virus
EKAQILYKK

SEQ ID NO: 21597 - protein, 9 aa, BK virus
KAQILYKKL

SEQ ID NO: 21598 - protein, 9 aa, BK virus
AQILYKKLM

SEQ ID NO: 21599 - protein, 9 aa, BK virus
QILYKKLME

SEQ ID NO: 21600 - protein, 9 aa, BK virus
ILYKKLMEK

SEQ ID NO: 21601 - protein, 9 aa, BK virus
LYKKLMEKY

SEQ ID NO: 21602 - protein, 9 aa, BK virus
YKKLMEKYS

SEQ ID NO: 21603 - protein, 9 aa, BK virus
KKLMEKYSV

SEQ ID NO: 21604 - protein, 9 aa, BK virus
KLMEKYSVT

SEQ ID NO: 21605 - protein, 9 aa, BK virus
LMEKYSVTF

SEQ ID NO: 21606 - protein, 9 aa, BK virus
MEKYSVTFI

SEQ ID NO: 21607 - protein, 9 aa, BK virus
EKYSVTFIS

SEQ ID NO: 21608 - protein, 9 aa, BK virus
KYSVTFISR

SEQ ID NO: 21609 - protein, 9 aa, BK virus
YSVTFISRH

SEQ ID NO: 21610 - protein, 9 aa, BK virus
SVTFISRHM

SEQ ID NO: 21611 - protein, 9 aa, BK virus
VTFISRHMC

SEQ ID NO: 21612 - protein, 9 aa, BK virus
TFISRHMCA

SEQ ID NO: 21613 - protein, 9 aa, BK virus
FISRHMCAG

SEQ ID NO: 21614 - protein, 9 aa, BK virus
ISRHMCAGH

SEQ ID NO: 21615 - protein, 9 aa, BK virus
SRHMCAGHN

SEQ ID NO: 21616 - protein, 9 aa, BK virus
RHMCAGHNI

SEQ ID NO: 21617 - protein, 9 aa, BK virus
HMCAGHNII

SEQ ID NO: 21618 - protein, 9 aa, BK virus
MCAGHNIIF

SEQ ID NO: 21619 - protein, 9 aa, BK virus
CAGHNIIFF

SEQ ID NO: 21620 - protein, 9 aa, BK virus
AGHNIIFFL

SEQ ID NO: 21621 - protein, 9 aa, BK virus
GHNIIFFLT

SEQ ID NO: 21622 - protein, 9 aa, BK virus
HNIIFFLTP

SEQ ID NO: 21623 - protein, 9 aa, BK virus
NIIFFLTPH

SEQ ID NO: 21624 - protein, 9 aa, BK virus
IIFFLTPHR

SEQ ID NO: 21625 - protein, 9 aa, BK virus
IFFLTPHRH

SEQ ID NO: 21626 - protein, 9 aa, BK virus
FFLTPHRHR

SEQ ID NO: 21627 - protein, 9 aa, BK virus
FLTPHRHRV

SEQ ID NO: 21628 - protein, 9 aa, BK virus
LTPHRHRVS

SEQ ID NO: 21629 - protein, 9 aa, BK virus
TPHRHRVSA

SEQ ID NO: 21630 - protein, 9 aa, BK virus
PHRHRVSAI

SEQ ID NO: 21631 - protein, 9 aa, BK virus
HRHRVSAIN

SEQ ID NO: 21632 - protein, 9 aa, BK virus
RHRVSAINN

SEQ ID NO: 21633 - protein, 9 aa, BK virus
HRVSAINNF

SEQ ID NO: 21634 - protein, 9 aa, BK virus
RVSAINNFC

SEQ ID NO: 21635 - protein, 9 aa, BK virus
VSAINNFCQ

SEQ ID NO: 21636 - protein, 9 aa, BK virus
SAINNFCQK

SEQ ID NO: 21637 - protein, 9 aa, BK virus
AINNFCQKL

SEQ ID NO: 21638 - protein, 9 aa, BK virus
INNFCQKLC

SEQ ID NO: 21639 - protein, 9 aa, BK virus
NNFCQKLCT

SEQ ID NO: 21640 - protein, 9 aa, BK virus
NFCQKLCTF

SEQ ID NO: 21641 - protein, 9 aa, BK virus
FCQKLCTFS

SEQ ID NO: 21642 - protein, 9 aa, BK virus
CQKLCTFSF

SEQ ID NO: 21643 - protein, 9 aa, BK virus
QKLCTFSFL

SEQ ID NO: 21644 - protein, 9 aa, BK virus
KLCTFSFLI

SEQ ID NO: 21645 - protein, 9 aa, BK virus
LCTFSFLIC

SEQ ID NO: 21646 - protein, 9 aa, BK virus
CTFSFLICK

SEQ ID NO: 21647 - protein, 9 aa, BK virus
TFSFLICKG

SEQ ID NO: 21648 - protein, 9 aa, BK virus
FSFLICKGV

SEQ ID NO: 21649 - protein, 9 aa, BK virus
SFLICKGVN

SEQ ID NO: 21650 - protein, 9 aa, BK virus
FLICKGVNK

SEQ ID NO: 21651 - protein, 9 aa, BK virus
LICKGVNKE

SEQ ID NO: 21652 - protein, 9 aa, BK virus
ICKGVNKEY

SEQ ID NO: 21653 - protein, 9 aa, BK virus
CKGVNKEYL

SEQ ID NO: 21654 - protein, 9 aa, BK virus
KGVNKEYLL

SEQ ID NO: 21655 - protein, 9 aa, BK virus
GVNKEYLLY

SEQ ID NO: 21656 - protein, 9 aa, BK virus
VNKEYLLYS

SEQ ID NO: 21657 - protein, 9 aa, BK virus
NKEYLLYSA

SEQ ID NO: 21658 - protein, 9 aa, BK virus
KEYLLYSAL

SEQ ID NO: 21659 - protein, 9 aa, BK virus
EYLLYSALT

SEQ ID NO: 21660 - protein, 9 aa, BK virus
YLLYSALTR

SEQ ID NO: 21661 - protein, 9 aa, BK virus
LLYSALTRD

SEQ ID NO: 21662 - protein, 9 aa, BK virus
LYSALTRDP

SEQ ID NO: 21663 - protein, 9 aa, BK virus
YSALTRDPY

SEQ ID NO: 21664 - protein, 9 aa, BK virus
SALTRDPYH

SEQ ID NO: 21665 - protein, 9 aa, BK virus
ALTRDPYHT

SEQ ID NO: 21666 - protein, 9 aa, BK virus
LTRDPYHTI

SEQ ID NO: 21667 - protein, 9 aa, BK virus
TRDPYHTIE

SEQ ID NO: 21668 - protein, 9 aa, BK virus
RDPYHTIEE

SEQ ID NO: 21669 - protein, 9 aa, BK virus
DPYHTIEES

SEQ ID NO: 21670 - protein, 9 aa, BK virus
PYHTIEESI

SEQ ID NO: 21671 - protein, 9 aa, BK virus
YHTIEESIQ

SEQ ID NO: 21672 - protein, 9 aa, BK virus
HTIEESIQG

SEQ ID NO: 21673 - protein, 9 aa, BK virus
TIEESIQGG

SEQ ID NO: 21674 - protein, 9 aa, BK virus
IEESIQGGL

SEQ ID NO: 21675 - protein, 9 aa, BK virus
EESIQGGLK

SEQ ID NO: 21676 - protein, 9 aa, BK virus
ESIQGGLKE

SEQ ID NO: 21677 - protein, 9 aa, BK virus
SIQGGLKEH

SEQ ID NO: 21678 - protein, 9 aa, BK virus
IQGGLKEHD

SEQ ID NO: 21679 - protein, 9 aa, BK virus
QGGLKEHDF

SEQ ID NO: 21680 - protein, 9 aa, BK virus
GGLKEHDFS

SEQ ID NO: 21681 - protein, 9 aa, BK virus
GLKEHDFSP

SEQ ID NO: 21682 - protein, 9 aa, BK virus
LKEHDFSPE

SEQ ID NO: 21683 - protein, 9 aa, BK virus
KEHDFSPEE

SEQ ID NO: 21684 - protein, 9 aa, BK virus
EHDFSPEEP

SEQ ID NO: 21685 - protein, 9 aa, BK virus
HDFSPEEPE

SEQ ID NO: 21686 - protein, 9 aa, BK virus
DFSPEEPEE

SEQ ID NO: 21687 - protein, 9 aa, BK virus
FSPEEPEET

SEQ ID NO: 21688 - protein, 9 aa, BK virus
SPEEPEETK

SEQ ID NO: 21689 - protein, 9 aa, BK virus
PEEPEETKQ

SEQ ID NO: 21690 - protein, 9 aa, BK virus
EEPEETKQV

SEQ ID NO: 21691 - protein, 9 aa, BK virus
EPEETKQVS

SEQ ID NO: 21692 - protein, 9 aa, BK virus
PEETKQVSW

SEQ ID NO: 21693 - protein, 9 aa, BK virus
EETKQVSWK

SEQ ID NO: 21694 - protein, 9 aa, BK virus
ETKQVSWKL

SEQ ID NO: 21695 - protein, 9 aa, BK virus
TKQVSWKLI

SEQ ID NO: 21696 - protein, 9 aa, BK virus
KQVSWKLIT

SEQ ID NO: 21697 - protein, 9 aa, BK virus
QVSWKLITE

SEQ ID NO: 21698 - protein, 9 aa, BK virus
VSWKLITEY

SEQ ID NO: 21699 - protein, 9 aa, BK virus
SWKLITEYA

SEQ ID NO: 21700 - protein, 9 aa, BK virus
WKLITEYAV

SEQ ID NO: 21701 - protein, 9 aa, BK virus
KLITEYAVE

SEQ ID NO: 21702 - protein, 9 aa, BK virus
LITEYAVET

SEQ ID NO: 21703 - protein, 9 aa, BK virus
ITEYAVETK

SEQ ID NO: 21704 - protein, 9 aa, BK virus
TEYAVETKC

SEQ ID NO: 21705 - protein, 9 aa, BK virus
EYAVETKCE

SEQ ID NO: 21706 - protein, 9 aa, BK virus
YAVETKCED

SEQ ID NO: 21707 - protein, 9 aa, BK virus
AVETKCEDV

SEQ ID NO: 21708 - protein, 9 aa, BK virus
VETKCEDVF

SEQ ID NO: 21709 - protein, 9 aa, BK virus
ETKCEDVFL

SEQ ID NO: 21710 - protein, 9 aa, BK virus
TKCEDVFLL

SEQ ID NO: 21711 - protein, 9 aa, BK virus
KCEDVFLLL

SEQ ID NO: 21712 - protein, 9 aa, BK virus
CEDVFLLLG

SEQ ID NO: 21713 - protein, 9 aa, BK virus
EDVFLLLGM

SEQ ID NO: 21714 - protein, 9 aa, BK virus
DVFLLLGMY

SEQ ID NO: 21715 - protein, 9 aa, BK virus
VFLLLGMYL

SEQ ID NO: 21716 - protein, 9 aa, BK virus
FLLLGMYLE

SEQ ID NO: 21717 - protein, 9 aa, BK virus
LLLGMYLEF

SEQ ID NO: 21718 - protein, 9 aa, BK virus
LLGMYLEFQ

SEQ ID NO: 21719 - protein, 9 aa, BK virus
LGMYLEFQY

SEQ ID NO: 21720 - protein, 9 aa, BK virus
GMYLEFQYN

SEQ ID NO: 21721 - protein, 9 aa, BK virus
MYLEFQYNV

SEQ ID NO: 21722 - protein, 9 aa, BK virus
YLEFQYNVE

SEQ ID NO: 21723 - protein, 9 aa, BK virus
LEFQYNVEE

SEQ ID NO: 21724 - protein, 9 aa, BK virus
EFQYNVEEC

SEQ ID NO: 21725 - protein, 9 aa, BK virus
FQYNVEECK

SEQ ID NO: 21726 - protein, 9 aa, BK virus
QYNVEECKK

SEQ ID NO: 21727 - protein, 9 aa, BK virus
YNVEECKKC

SEQ ID NO: 21728 - protein, 9 aa, BK virus
NVEECKKCQ

SEQ ID NO: 21729 - protein, 9 aa, BK virus
VEECKKCQK

SEQ ID NO: 21730 - protein, 9 aa, BK virus
EECKKCQKK

SEQ ID NO: 21731 - protein, 9 aa, BK virus
ECKKCQKKD

SEQ ID NO: 21732 - protein, 9 aa, BK virus
CKKCQKKDQ

SEQ ID NO: 21733 - protein, 9 aa, BK virus
KKCQKKDQP

SEQ ID NO: 21734 - protein, 9 aa, BK virus
KCQKKDQPY

SEQ ID NO: 21735 - protein, 9 aa, BK virus
CQKKDQPYH

SEQ ID NO: 21736 - protein, 9 aa, BK virus
QKKDQPYHF

SEQ ID NO: 21737 - protein, 9 aa, BK virus
KKDQPYHFK

SEQ ID NO: 21738 - protein, 9 aa, BK virus
KDQPYHFKY

SEQ ID NO: 21739 - protein, 9 aa, BK virus
DQPYHFKYH

SEQ ID NO: 21740 - protein, 9 aa, BK virus
QPYHFKYHE

SEQ ID NO: 21741 - protein, 9 aa, BK virus
PYHFKYHEK

SEQ ID NO: 21742 - protein, 9 aa, BK virus
YHFKYHEKH

SEQ ID NO: 21743 - protein, 9 aa, BK virus
HFKYHEKHF

SEQ ID NO: 21744 - protein, 9 aa, BK virus
FKYHEKHFA

SEQ ID NO: 21745 - protein, 9 aa, BK virus
KYHEKHFAN

SEQ ID NO: 21746 - protein, 9 aa, BK virus
YHEKHFANA

SEQ ID NO: 21747 - protein, 9 aa, BK virus
HEKHFANAI

SEQ ID NO: 21748 - protein, 9 aa, BK virus
EKHFANAII

SEQ ID NO: 21749 - protein, 9 aa, BK virus
KHFANAIIF

SEQ ID NO: 21750 - protein, 9 aa, BK virus
HFANAIIFA

SEQ ID NO: 21751 - protein, 9 aa, BK virus
FANAIIFAE

SEQ ID NO: 21752 - protein, 9 aa, BK virus
ANAIIFAES

SEQ ID NO: 21753 - protein, 9 aa, BK virus
NAIIFAESK

SEQ ID NO: 21754 - protein, 9 aa, BK virus
AIIFAESKN

SEQ ID NO: 21755 - protein, 9 aa, BK virus
IIFAESKNQ

SEQ ID NO: 21756 - protein, 9 aa, BK virus
IFAESKNQK

SEQ ID NO: 21757 - protein, 9 aa, BK virus
FAESKNQKS

SEQ ID NO: 21758 - protein, 9 aa, BK virus
AESKNQKSI

SEQ ID NO: 21759 - protein, 9 aa, BK virus
ESKNQKSIC

SEQ ID NO: 21760 - protein, 9 aa, BK virus
SKNQKSICQ

SEQ ID NO: 21761 - protein, 9 aa, BK virus
KNQKSICQQ

SEQ ID NO: 21762 - protein, 9 aa, BK virus
NQKSICQQA

SEQ ID NO: 21763 - protein, 9 aa, BK virus
QKSICQQAV

SEQ ID NO: 21764 - protein, 9 aa, BK virus
KSICQQAVD

SEQ ID NO: 21765 - protein, 9 aa, BK virus
SICQQAVDT

SEQ ID NO: 21766 - protein, 9 aa, BK virus
ICQQAVDTV

SEQ ID NO: 21767 - protein, 9 aa, BK virus
CQQAVDTVL

SEQ ID NO: 21768 - protein, 9 aa, BK virus
QQAVDTVLA

SEQ ID NO: 21769 - protein, 9 aa, BK virus
QAVDTVLAK

SEQ ID NO: 21770 - protein, 9 aa, BK virus
AVDTVLAKK

SEQ ID NO: 21771 - protein, 9 aa, BK virus
VDTVLAKKR

SEQ ID NO: 21772 - protein, 9 aa, BK virus
DTVLAKKRV

SEQ ID NO: 21773 - protein, 9 aa, BK virus
TVLAKKRVD

SEQ ID NO: 21774 - protein, 9 aa, BK virus
VLAKKRVDT

SEQ ID NO: 21775 - protein, 9 aa, BK virus
LAKKRVDTL

SEQ ID NO: 21776 - protein, 9 aa, BK virus
AKKRVDTLH

SEQ ID NO: 21777 - protein, 9 aa, BK virus
KKRVDTLHM

SEQ ID NO: 21778 - protein, 9 aa, BK virus
KRVDTLHMT

SEQ ID NO: 21779 - protein, 9 aa, BK virus
RVDTLHMTR

SEQ ID NO: 21780 - protein, 9 aa, BK virus
VDTLHMTRE

SEQ ID NO: 21781 - protein, 9 aa, BK virus
DTLHMTREE

SEQ ID NO: 21782 - protein, 9 aa, BK virus
TLHMTREEM

SEQ ID NO: 21783 - protein, 9 aa, BK virus
LHMTREEML

SEQ ID NO: 21784 - protein, 9 aa, BK virus
HMTREEMLT

SEQ ID NO: 21785 - protein, 9 aa, BK virus
MTREEMLTE

SEQ ID NO: 21786 - protein, 9 aa, BK virus
TREEMLTER

SEQ ID NO: 21787 - protein, 9 aa, BK virus
REEMLTERF

SEQ ID NO: 21788 - protein, 9 aa, BK virus
EEMLTERFN

SEQ ID NO: 21789 - protein, 9 aa, BK virus
EMLTERFNH

SEQ ID NO: 21790 - protein, 9 aa, BK virus
MLTERFNHI

SEQ ID NO: 21791 - protein, 9 aa, BK virus
LTERFNHIL

SEQ ID NO: 21792 - protein, 9 aa, BK virus
TERFNHILD

SEQ ID NO: 21793 - protein, 9 aa, BK virus
ERFNHILDK

SEQ ID NO: 21794 - protein, 9 aa, BK virus
RFNHILDKM

SEQ ID NO: 21795 - protein, 9 aa, BK virus
FNHILDKMD

SEQ ID NO: 21796 - protein, 9 aa, BK virus
NHILDKMDL

SEQ ID NO: 21797 - protein, 9 aa, BK virus
HILDKMDLI

SEQ ID NO: 21798 - protein, 9 aa, BK virus
ILDKMDLIF

SEQ ID NO: 21799 - protein, 9 aa, BK virus
LDKMDLIFG

SEQ ID NO: 21800 - protein, 9 aa, BK virus
DKMDLIFGA

SEQ ID NO: 21801 - protein, 9 aa, BK virus
KMDLIFGAH

SEQ ID NO: 21802 - protein, 9 aa, BK virus
MDLIFGAHG

SEQ ID NO: 21803 - protein, 9 aa, BK virus
DLIFGAHGN

SEQ ID NO: 21804 - protein, 9 aa, BK virus
LIFGAHGNA

SEQ ID NO: 21805 - protein, 9 aa, BK virus
IFGAHGNAV

SEQ ID NO: 21806 - protein, 9 aa, BK virus
FGAHGNAVL

SEQ ID NO: 21807 - protein, 9 aa, BK virus
GAHGNAVLE

SEQ ID NO: 21808 - protein, 9 aa, BK virus
AHGNAVLEQ

SEQ ID NO: 21809 - protein, 9 aa, BK virus
HGNAVLEQY

SEQ ID NO: 21810 - protein, 9 aa, BK virus
GNAVLEQYM

SEQ ID NO: 21811 - protein, 9 aa, BK virus
NAVLEQYMA

SEQ ID NO: 21812 - protein, 9 aa, BK virus
AVLEQYMAG

SEQ ID NO: 21813 - protein, 9 aa, BK virus
VLEQYMAGV

SEQ ID NO: 21814 - protein, 9 aa, BK virus
LEQYMAGVA

SEQ ID NO: 21815 - protein, 9 aa, BK virus
EQYMAGVAW

SEQ ID NO: 21816 - protein, 9 aa, BK virus
QYMAGVAWL

SEQ ID NO: 21817 - protein, 9 aa, BK virus
YMAGVAWLH

SEQ ID NO: 21818 - protein, 9 aa, BK virus
MAGVAWLHC

SEQ ID NO: 21819 - protein, 9 aa, BK virus
AGVAWLHCL

SEQ ID NO: 21820 - protein, 9 aa, BK virus
GVAWLHCLL

SEQ ID NO: 21821 - protein, 9 aa, BK virus
VAWLHCLLP

SEQ ID NO: 21822 - protein, 9 aa, BK virus
AWLHCLLPK

SEQ ID NO: 21823 - protein, 9 aa, BK virus
WLHCLLPKM

SEQ ID NO: 21824 - protein, 9 aa, BK virus
LHCLLPKMD

SEQ ID NO: 21825 - protein, 9 aa, BK virus
HCLLPKMDS

SEQ ID NO: 21826 - protein, 9 aa, BK virus
CLLPKMDSV

SEQ ID NO: 21827 - protein, 9 aa, BK virus
LLPKMDSVI

SEQ ID NO: 21828 - protein, 9 aa, BK virus
LPKMDSVIF

SEQ ID NO: 21829 - protein, 9 aa, BK virus
PKMDSVIFD

SEQ ID NO: 21830 - protein, 9 aa, BK virus
KMDSVIFDF

SEQ ID NO: 21831 - protein, 9 aa, BK virus
MDSVIFDFL

SEQ ID NO: 21832 - protein, 9 aa, BK virus
DSVIFDFLH

SEQ ID NO: 21833 - protein, 9 aa, BK virus
SVIFDFLHC

SEQ ID NO: 21834 - protein, 9 aa, BK virus
VIFDFLHCI

SEQ ID NO: 21835 - protein, 9 aa, BK virus
IFDFLHCIV

SEQ ID NO: 21836 - protein, 9 aa, BK virus
FDFLHCIVF

SEQ ID NO: 21837 - protein, 9 aa, BK virus
DFLHCIVFN

SEQ ID NO: 21838 - protein, 9 aa, BK virus
FLHCIVFNV

SEQ ID NO: 21839 - protein, 9 aa, BK virus
LHCIVFNVP

SEQ ID NO: 21840 - protein, 9 aa, BK virus
HCIVFNVPK

SEQ ID NO: 21841 - protein, 9 aa, BK virus
CIVFNVPKR

SEQ ID NO: 21842 - protein, 9 aa, BK virus
IVFNVPKRR

SEQ ID NO: 21843 - protein, 9 aa, BK virus
VFNVPKRRY

SEQ ID NO: 21844 - protein, 9 aa, BK virus
FNVPKRRYW

SEQ ID NO: 21845 - protein, 9 aa, BK virus
NVPKRRYWL

SEQ ID NO: 21846 - protein, 9 aa, BK virus
VPKRRYWLF

SEQ ID NO: 21847 - protein, 9 aa, BK virus
PKRRYWLFK

SEQ ID NO: 21848 - protein, 9 aa, BK virus
KRRYWLFKG

SEQ ID NO: 21849 - protein, 9 aa, BK virus
RRYWLFKGP

SEQ ID NO: 21850 - protein, 9 aa, BK virus
RYWLFKGPI

SEQ ID NO: 21851 - protein, 9 aa, BK virus
YWLFKGPID

SEQ ID NO: 21852 - protein, 9 aa, BK virus
WLFKGPIDS

SEQ ID NO: 21853 - protein, 9 aa, BK virus
LFKGPIDSG

SEQ ID NO: 21854 - protein, 9 aa, BK virus
FKGPIDSGK

SEQ ID NO: 21855 - protein, 9 aa, BK virus
KGPIDSGKT

SEQ ID NO: 21856 - protein, 9 aa, BK virus
GPIDSGKTT

SEQ ID NO: 21857 - protein, 9 aa, BK virus
PIDSGKTTL

SEQ ID NO: 21858 - protein, 9 aa, BK virus
IDSGKTTLA

SEQ ID NO: 21859 - protein, 9 aa, BK virus
DSGKTTLAA

SEQ ID NO: 21860 - protein, 9 aa, BK virus
SGKTTLAAG

SEQ ID NO: 21861 - protein, 9 aa, BK virus
GKTTLAAGL

SEQ ID NO: 21862 - protein, 9 aa, BK virus
KTTLAAGLL

SEQ ID NO: 21863 - protein, 9 aa, BK virus
TTLAAGLLD

SEQ ID NO: 21864 - protein, 9 aa, BK virus
TLAAGLLDL

SEQ ID NO: 21865 - protein, 9 aa, BK virus
LAAGLLDLC

SEQ ID NO: 21866 - protein, 9 aa, BK virus
AAGLLDLCG

SEQ ID NO: 21867 - protein, 9 aa, BK virus
AGLLDLCGG

SEQ ID NO: 21868 - protein, 9 aa, BK virus
GLLDLCGGK

SEQ ID NO: 21869 - protein, 9 aa, BK virus
LLDLCGGKA

SEQ ID NO: 21870 - protein, 9 aa, BK virus
LDLCGGKAL

SEQ ID NO: 21871 - protein, 9 aa, BK virus
DLCGGKALN

SEQ ID NO: 21872 - protein, 9 aa, BK virus
LCGGKALNV

SEQ ID NO: 21873 - protein, 9 aa, BK virus
CGGKALNVN

SEQ ID NO: 21874 - protein, 9 aa, BK virus
GGKALNVNL

SEQ ID NO: 21875 - protein, 9 aa, BK virus
GKALNVNLP

SEQ ID NO: 21876 - protein, 9 aa, BK virus
KALNVNLPM

SEQ ID NO: 21877 - protein, 9 aa, BK virus
ALNVNLPME

SEQ ID NO: 21878 - protein, 9 aa, BK virus
LNVNLPMER

SEQ ID NO: 21879 - protein, 9 aa, BK virus
NVNLPMERL

SEQ ID NO: 21880 - protein, 9 aa, BK virus
VNLPMERLT

SEQ ID NO: 21881 - protein, 9 aa, BK virus
NLPMERLTF

SEQ ID NO: 21882 - protein, 9 aa, BK virus
LPMERLTFE

SEQ ID NO: 21883 - protein, 9 aa, BK virus
PMERLTFEL

SEQ ID NO: 21884 - protein, 9 aa, BK virus
MERLTFELG

SEQ ID NO: 21885 - protein, 9 aa, BK virus
ERLTFELGV

SEQ ID NO: 21886 - protein, 9 aa, BK virus
RLTFELGVA

SEQ ID NO: 21887 - protein, 9 aa, BK virus
LTFELGVAI

SEQ ID NO: 21888 - protein, 9 aa, BK virus
TFELGVAID

SEQ ID NO: 21889 - protein, 9 aa, BK virus
FELGVAIDQ

SEQ ID NO: 21890 - protein, 9 aa, BK virus
ELGVAIDQY

SEQ ID NO: 21891 - protein, 9 aa, BK virus
LGVAIDQYM

SEQ ID NO: 21892 - protein, 9 aa, BK virus
GVAIDQYMV

SEQ ID NO: 21893 - protein, 9 aa, BK virus
VAIDQYMVV

SEQ ID NO: 21894 - protein, 9 aa, BK virus
AIDQYMVVF

SEQ ID NO: 21895 - protein, 9 aa, BK virus
IDQYMVVFE

SEQ ID NO: 21896 - protein, 9 aa, BK virus
DQYMVVFED

SEQ ID NO: 21897 - protein, 9 aa, BK virus
QYMVVFEDV

SEQ ID NO: 21898 - protein, 9 aa, BK virus
YMVVFEDVK

SEQ ID NO: 21899 - protein, 9 aa, BK virus
MVVFEDVKG

SEQ ID NO: 21900 - protein, 9 aa, BK virus
VVFEDVKGT

SEQ ID NO: 21901 - protein, 9 aa, BK virus
VFEDVKGTG

SEQ ID NO: 21902 - protein, 9 aa, BK virus
FEDVKGTGA

SEQ ID NO: 21903 - protein, 9 aa, BK virus
EDVKGTGAE

SEQ ID NO: 21904 - protein, 9 aa, BK virus
DVKGTGAES

SEQ ID NO: 21905 - protein, 9 aa, BK virus
VKGTGAESK

SEQ ID NO: 21906 - protein, 9 aa, BK virus
KGTGAESKD

SEQ ID NO: 21907 - protein, 9 aa, BK virus
GTGAESKDL

SEQ ID NO: 21908 - protein, 9 aa, BK virus
TGAESKDLP

SEQ ID NO: 21909 - protein, 9 aa, BK virus
GAESKDLPS

SEQ ID NO: 21910 - protein, 9 aa, BK virus
AESKDLPSG

SEQ ID NO: 21911 - protein, 9 aa, BK virus
ESKDLPSGH

SEQ ID NO: 21912 - protein, 9 aa, BK virus
SKDLPSGHG

SEQ ID NO: 21913 - protein, 9 aa, BK virus
KDLPSGHGI

SEQ ID NO: 21914 - protein, 9 aa, BK virus
DLPSGHGIN

SEQ ID NO: 21915 - protein, 9 aa, BK virus
LPSGHGINN

SEQ ID NO: 21916 - protein, 9 aa, BK virus
PSGHGINNL

SEQ ID NO: 21917 - protein, 9 aa, BK virus
SGHGINNLD

SEQ ID NO: 21918 - protein, 9 aa, BK virus
GHGINNLDS

SEQ ID NO: 21919 - protein, 9 aa, BK virus
HGINNLDSL

SEQ ID NO: 21920 - protein, 9 aa, BK virus
GINNLDSLR

SEQ ID NO: 21921 - protein, 9 aa, BK virus
INNLDSLRD

SEQ ID NO: 21922 - protein, 9 aa, BK virus
NNLDSLRDY

SEQ ID NO: 21923 - protein, 9 aa, BK virus
NLDSLRDYL

SEQ ID NO: 21924 - protein, 9 aa, BK virus
LDSLRDYLD

SEQ ID NO: 21925 - protein, 9 aa, BK virus
DSLRDYLDG

SEQ ID NO: 21926 - protein, 9 aa, BK virus
SLRDYLDGS

SEQ ID NO: 21927 - protein, 9 aa, BK virus
LRDYLDGSV

SEQ ID NO: 21928 - protein, 9 aa, BK virus
RDYLDGSVK

SEQ ID NO: 21929 - protein, 9 aa, BK virus
DYLDGSVKV

SEQ ID NO: 21930 - protein, 9 aa, BK virus
YLDGSVKVN

SEQ ID NO: 21931 - protein, 9 aa, BK virus
LDGSVKVNL

SEQ ID NO: 21932 - protein, 9 aa, BK virus
DGSVKVNLE

SEQ ID NO: 21933 - protein, 9 aa, BK virus
GSVKVNLEK

SEQ ID NO: 21934 - protein, 9 aa, BK virus
SVKVNLEKK

SEQ ID NO: 21935 - protein, 9 aa, BK virus
VKVNLEKKH

SEQ ID NO: 21936 - protein, 9 aa, BK virus
KVNLEKKHL

SEQ ID NO: 21937 - protein, 9 aa, BK virus
VNLEKKHLN

SEQ ID NO: 21938 - protein, 9 aa, BK virus
NLEKKHLNK

SEQ ID NO: 21939 - protein, 9 aa, BK virus
LEKKHLNKR

SEQ ID NO: 21940 - protein, 9 aa, BK virus
EKKHLNKRT

SEQ ID NO: 21941 - protein, 9 aa, BK virus
KKHLNKRTQ

SEQ ID NO: 21942 - protein, 9 aa, BK virus
KHLNKRTQI

SEQ ID NO: 21943 - protein, 9 aa, BK virus
HLNKRTQIF

SEQ ID NO: 21944 - protein, 9 aa, BK virus
LNKRTQIFP

SEQ ID NO: 21945 - protein, 9 aa, BK virus
NKRTQIFPP

SEQ ID NO: 21946 - protein, 9 aa, BK virus
KRTQIFPPG

SEQ ID NO: 21947 - protein, 9 aa, BK virus
RTQIFPPGL

SEQ ID NO: 21948 - protein, 9 aa, BK virus
TQIFPPGLV

SEQ ID NO: 21949 - protein, 9 aa, BK virus
QIFPPGLVT

SEQ ID NO: 21950 - protein, 9 aa, BK virus
IFPPGLVTM

SEQ ID NO: 21951 - protein, 9 aa, BK virus
FPPGLVTMN

SEQ ID NO: 21952 - protein, 9 aa, BK virus
PPGLVTMNE

SEQ ID NO: 21953 - protein, 9 aa, BK virus
PGLVTMNEY

SEQ ID NO: 21954 - protein, 9 aa, BK virus
GLVTMNEYP

SEQ ID NO: 21955 - protein, 9 aa, BK virus
LVTMNEYPV

SEQ ID NO: 21956 - protein, 9 aa, BK virus
VTMNEYPVP

SEQ ID NO: 21957 - protein, 9 aa, BK virus
TMNEYPVPK

SEQ ID NO: 21958 - protein, 9 aa, BK virus
MNEYPVPKT

SEQ ID NO: 21959 - protein, 9 aa, BK virus
NEYPVPKTL

SEQ ID NO: 21960 - protein, 9 aa, BK virus
EYPVPKTLQ

SEQ ID NO: 21961 - protein, 9 aa, BK virus
YPVPKTLQA

SEQ ID NO: 21962 - protein, 9 aa, BK virus
PVPKTLQAR

SEQ ID NO: 21963 - protein, 9 aa, BK virus
VPKTLQARF

SEQ ID NO: 21964 - protein, 9 aa, BK virus
PKTLQARFV

SEQ ID NO: 21965 - protein, 9 aa, BK virus
KTLQARFVR

SEQ ID NO: 21966 - protein, 9 aa, BK virus
TLQARFVRQ

SEQ ID NO: 21967 - protein, 9 aa, BK virus
LQARFVRQI

SEQ ID NO: 21968 - protein, 9 aa, BK virus
QARFVRQID

SEQ ID NO: 21969 - protein, 9 aa, BK virus
ARFVRQIDF

SEQ ID NO: 21970 - protein, 9 aa, BK virus
RFVRQIDFR

SEQ ID NO: 21971 - protein, 9 aa, BK virus
FVRQIDFRP

SEQ ID NO: 21972 - protein, 9 aa, BK virus
VRQIDFRPK

SEQ ID NO: 21973 - protein, 9 aa, BK virus
RQIDFRPKI

SEQ ID NO: 21974 - protein, 9 aa, BK virus
QIDFRPKIY

SEQ ID NO: 21975 - protein, 9 aa, BK virus
IDFRPKIYL

SEQ ID NO: 21976 - protein, 9 aa, BK virus
DFRPKIYLR

SEQ ID NO: 21977 - protein, 9 aa, BK virus
FRPKIYLRK

SEQ ID NO: 21978 - protein, 9 aa, BK virus
RPKIYLRKS

SEQ ID NO: 21979 - protein, 9 aa, BK virus
PKIYLRKSL

SEQ ID NO: 21980 - protein, 9 aa, BK virus
KIYLRKSLQ

SEQ ID NO: 21981 - protein, 9 aa, BK virus
IYLRKSLQN

SEQ ID NO: 21982 - protein, 9 aa, BK virus
YLRKSLQNS

SEQ ID NO: 21983 - protein, 9 aa, BK virus
LRKSLQNSE

SEQ ID NO: 21984 - protein, 9 aa, BK virus
RKSLQNSEF

SEQ ID NO: 21985 - protein, 9 aa, BK virus
KSLQNSEFL

SEQ ID NO: 21986 - protein, 9 aa, BK virus
SLQNSEFLL

SEQ ID NO: 21987 - protein, 9 aa, BK virus
LQNSEFLLE

SEQ ID NO: 21988 - protein, 9 aa, BK virus
QNSEFLLEK

SEQ ID NO: 21989 - protein, 9 aa, BK virus
NSEFLLEKR

SEQ ID NO: 21990 - protein, 9 aa, BK virus
SEFLLEKRI

SEQ ID NO: 21991 - protein, 9 aa, BK virus
EFLLEKRIL

SEQ ID NO: 21992 - protein, 9 aa, BK virus
FLLEKRILQ

SEQ ID NO: 21993 - protein, 9 aa, BK virus
LLEKRILQS

SEQ ID NO: 21994 - protein, 9 aa, BK virus
LEKRILQSG

SEQ ID NO: 21995 - protein, 9 aa, BK virus
EKRILQSGM

SEQ ID NO: 21996 - protein, 9 aa, BK virus
KRILQSGMT

SEQ ID NO: 21997 - protein, 9 aa, BK virus
RILQSGMTL

SEQ ID NO: 21998 - protein, 9 aa, BK virus
ILQSGMTLL

SEQ ID NO: 21999 - protein, 9 aa, BK virus
LQSGMTLLL

SEQ ID NO: 22000 - protein, 9 aa, BK virus
QSGMTLLLL

SEQ ID NO: 22001 - protein, 9 aa, BK virus
SGMTLLLLL

SEQ ID NO: 22002 - protein, 9 aa, BK virus
GMTLLLLLI

SEQ ID NO: 22003 - protein, 9 aa, BK virus
MTLLLLLIW

SEQ ID NO: 22004 - protein, 9 aa, BK virus
TLLLLLIWF

SEQ ID NO: 22005 - protein, 9 aa, BK virus
LLLLLIWFR

SEQ ID NO: 22006 - protein, 9 aa, BK virus
LLLLIWFRP

SEQ ID NO: 22007 - protein, 9 aa, BK virus
LLLIWFRPV

SEQ ID NO: 22008 - protein, 9 aa, BK virus
LLIWFRPVA

SEQ ID NO: 22009 - protein, 9 aa, BK virus
LIWFRPVAD

SEQ ID NO: 22010 - protein, 9 aa, BK virus
IWFRPVADF

SEQ ID NO: 22011 - protein, 9 aa, BK virus
WFRPVADFA

SEQ ID NO: 22012 - protein, 9 aa, BK virus
FRPVADFAT

SEQ ID NO: 22013 - protein, 9 aa, BK virus
RPVADFATD

SEQ ID NO: 22014 - protein, 9 aa, BK virus
PVADFATDI

SEQ ID NO: 22015 - protein, 9 aa, BK virus
VADFATDIQ

SEQ ID NO: 22016 - protein, 9 aa, BK virus
ADFATDIQS

SEQ ID NO: 22017 - protein, 9 aa, BK virus
DFATDIQSR

SEQ ID NO: 22018 - protein, 9 aa, BK virus
FATDIQSRI

SEQ ID NO: 22019 - protein, 9 aa, BK virus
ATDIQSRIV

SEQ ID NO: 22020 - protein, 9 aa, BK virus
TDIQSRIVE

SEQ ID NO: 22021 - protein, 9 aa, BK virus
DIQSRIVEW

SEQ ID NO: 22022 - protein, 9 aa, BK virus
IQSRIVEWK

SEQ ID NO: 22023 - protein, 9 aa, BK virus
QSRIVEWKE

SEQ ID NO: 22024 - protein, 9 aa, BK virus
SRIVEWKER

SEQ ID NO: 22025 - protein, 9 aa, BK virus
RIVEWKERL

SEQ ID NO: 22026 - protein, 9 aa, BK virus
IVEWKERLD

SEQ ID NO: 22027 - protein, 9 aa, BK virus
VEWKERLDS

SEQ ID NO: 22028 - protein, 9 aa, BK virus
EWKERLDSE

SEQ ID NO: 22029 - protein, 9 aa, BK virus
WKERLDSEI

SEQ ID NO: 22030 - protein, 9 aa, BK virus
KERLDSEIS

SEQ ID NO: 22031 - protein, 9 aa, BK virus
ERLDSEISM

SEQ ID NO: 22032 - protein, 9 aa, BK virus
RLDSEISMY

SEQ ID NO: 22033 - protein, 9 aa, BK virus
LDSEISMYT

SEQ ID NO: 22034 - protein, 9 aa, BK virus
DSEISMYTF

SEQ ID NO: 22035 - protein, 9 aa, BK virus
SEISMYTFS

SEQ ID NO: 22036 - protein, 9 aa, BK virus
EISMYTFSR

SEQ ID NO: 22037 - protein, 9 aa, BK virus
ISMYTFSRM

SEQ ID NO: 22038 - protein, 9 aa, BK virus
SMYTFSRMK

SEQ ID NO: 22039 - protein, 9 aa, BK virus
MYTFSRMKY

SEQ ID NO: 22040 - protein, 9 aa, BK virus
YTFSRMKYN

SEQ ID NO: 22041 - protein, 9 aa, BK virus
TFSRMKYNI

SEQ ID NO: 22042 - protein, 9 aa, BK virus
FSRMKYNIC

SEQ ID NO: 22043 - protein, 9 aa, BK virus
SRMKYNICM

SEQ ID NO: 22044 - protein, 9 aa, BK virus
RMKYNICMG

SEQ ID NO: 22045 - protein, 9 aa, BK virus
MKYNICMGK

SEQ ID NO: 22046 - protein, 9 aa, BK virus
KYNICMGKC

SEQ ID NO: 22047 - protein, 9 aa, BK virus
YNICMGKCI

SEQ ID NO: 22048 - protein, 9 aa, BK virus
NICMGKCIL

SEQ ID NO: 22049 - protein, 9 aa, BK virus
ICMGKCILD

SEQ ID NO: 22050 - protein, 9 aa, BK virus
CMGKCILDI

SEQ ID NO: 22051 - protein, 9 aa, BK virus
MGKCILDIT

SEQ ID NO: 22052 - protein, 9 aa, BK virus
GKCILDITR

SEQ ID NO: 22053 - protein, 9 aa, BK virus
KCILDITRE

SEQ ID NO: 22054 - protein, 9 aa, BK virus
CILDITREE

SEQ ID NO: 22055 - protein, 9 aa, BK virus
ILDITREED

SEQ ID NO: 22056 - protein, 9 aa, BK virus
LDITREEDS

SEQ ID NO: 22057 - protein, 9 aa, BK virus
DITREEDSE

SEQ ID NO: 22058 - protein, 9 aa, BK virus
ITREEDSET

SEQ ID NO: 22059 - protein, 9 aa, BK virus
TREEDSETE

SEQ ID NO: 22060 - protein, 9 aa, BK virus
REEDSETED

SEQ ID NO: 22061 - protein, 9 aa, BK virus
EEDSETEDS

SEQ ID NO: 22062 - protein, 9 aa, BK virus
EDSETEDSG

SEQ ID NO: 22063 - protein, 9 aa, BK virus
DSETEDSGH

SEQ ID NO: 22064 - protein, 9 aa, BK virus
SETEDSGHG

SEQ ID NO: 22065 - protein, 9 aa, BK virus
ETEDSGHGS

SEQ ID NO: 22066 - protein, 9 aa, BK virus
TEDSGHGSS

SEQ ID NO: 22067 - protein, 9 aa, BK virus
EDSGHGSST

SEQ ID NO: 22068 - protein, 9 aa, BK virus
DSGHGSSTE

SEQ ID NO: 22069 - protein, 9 aa, BK virus
SGHGSSTES

SEQ ID NO: 22070 - protein, 9 aa, BK virus
GHGSSTESQ

SEQ ID NO: 22071 - protein, 9 aa, BK virus
HGSSTESQS

SEQ ID NO: 22072 - protein, 9 aa, BK virus
GSSTESQSQ

SEQ ID NO: 22073 - protein, 9 aa, BK virus
SSTESQSQC

SEQ ID NO: 22074 - protein, 9 aa, BK virus
STESQSQCS

SEQ ID NO: 22075 - protein, 9 aa, BK virus
TESQSQCSS

SEQ ID NO: 22076 - protein, 9 aa, BK virus
ESQSQCSSQ

SEQ ID NO: 22077 - protein, 9 aa, BK virus
SQSQCSSQV

SEQ ID NO: 22078 - protein, 9 aa, BK virus
QSQCSSQVS

SEQ ID NO: 22079 - protein, 9 aa, BK virus
SQCSSQVSD

SEQ ID NO: 22080 - protein, 9 aa, BK virus
QCSSQVSDT

SEQ ID NO: 22081 - protein, 9 aa, BK virus
CSSQVSDTS

SEQ ID NO: 22082 - protein, 9 aa, BK virus
SSQVSDTSA

SEQ ID NO: 22083 - protein, 9 aa, BK virus
SQVSDTSAP

SEQ ID NO: 22084 - protein, 9 aa, BK virus
QVSDTSAPA

SEQ ID NO: 22085 - protein, 9 aa, BK virus
VSDTSAPAE

SEQ ID NO: 22086 - protein, 9 aa, BK virus
SDTSAPAED

SEQ ID NO: 22087 - protein, 9 aa, BK virus
DTSAPAEDS

SEQ ID NO: 22088 - protein, 9 aa, BK virus
TSAPAEDSQ

SEQ ID NO: 22089 - protein, 9 aa, BK virus
SAPAEDSQR

SEQ ID NO: 22090 - protein, 9 aa, BK virus
APAEDSQRS

SEQ ID NO: 22091 - protein, 9 aa, BK virus
PAEDSQRSD

SEQ ID NO: 22092 - protein, 9 aa, BK virus
AEDSQRSDP

SEQ ID NO: 22093 - protein, 9 aa, BK virus
EDSQRSDPH

SEQ ID NO: 22094 - protein, 9 aa, BK virus
DSQRSDPHS

SEQ ID NO: 22095 - protein, 9 aa, BK virus
SQRSDPHSQ

SEQ ID NO: 22096 - protein, 9 aa, BK virus
QRSDPHSQE

SEQ ID NO: 22097 - protein, 9 aa, BK virus
RSDPHSQEL

SEQ ID NO: 22098 - protein, 9 aa, BK virus
SDPHSQELH

SEQ ID NO: 22099 - protein, 9 aa, BK virus
DPHSQELHL

SEQ ID NO: 22100 - protein, 9 aa, BK virus
PHSQELHLC

SEQ ID NO: 22101 - protein, 9 aa, BK virus
HSQELHLCK

SEQ ID NO: 22102 - protein, 9 aa, BK virus
SQELHLCKG

SEQ ID NO: 22103 - protein, 9 aa, BK virus
QELHLCKGF

SEQ ID NO: 22104 - protein, 9 aa, BK virus
ELHLCKGFQ

SEQ ID NO: 22105 - protein, 9 aa, BK virus
LHLCKGFQC

SEQ ID NO: 22106 - protein, 9 aa, BK virus
HLCKGFQCF

SEQ ID NO: 22107 - protein, 9 aa, BK virus
LCKGFQCFK

SEQ ID NO: 22108 - protein, 9 aa, BK virus
CKGFQCFKR

SEQ ID NO: 22109 - protein, 9 aa, BK virus
KGFQCFKRP

SEQ ID NO: 22110 - protein, 9 aa, BK virus
GFQCFKRPK

SEQ ID NO: 22111 - protein, 9 aa, BK virus
FQCFKRPKT

SEQ ID NO: 22112 - protein, 9 aa, BK virus
QCFKRPKTP

SEQ ID NO: 22113 - protein, 9 aa, BK virus
CFKRPKTPP

SEQ ID NO: 22114 - protein, 9 aa, BK virus
FKRPKTPPP

SEQ ID NO: 22115 - protein, 9 aa, BK virus
KRPKTPPPK

SEQ ID NO: 22116 - protein, 9 aa, BK virus
HKLKSGLYK

SEQ ID NO: 22117 - protein, 9 aa, BK virus
KLKSGLYKS

SEQ ID NO: 22118 - protein, 9 aa, BK virus
LKSGLYKSS

SEQ ID NO: 22119 - protein, 9 aa, BK virus
KSGLYKSSI

SEQ ID NO: 22120 - protein, 9 aa, BK virus
SGLYKSSIY

SEQ ID NO: 22121 - protein, 9 aa, BK virus
MYMYNKSTC

SEQ ID NO: 22122 - protein, 9 aa, BK virus
YMYNKSTCL

SEQ ID NO: 22123 - protein, 9 aa, BK virus
MYNKSTCLK

SEQ ID NO: 22124 - protein, 9 aa, BK virus
YNKSTCLKH

SEQ ID NO: 22125 - protein, 9 aa, BK virus
NKSTCLKHF

SEQ ID NO: 22126 - protein, 9 aa, BK virus
KSTCLKHFG

SEQ ID NO: 22127 - protein, 9 aa, BK virus
STCLKHFGL

SEQ ID NO: 22128 - protein, 9 aa, BK virus
TCLKHFGLQ

SEQ ID NO: 22129 - protein, 9 aa, BK virus
CLKHFGLQL

SEQ ID NO: 22130 - protein, 9 aa, BK virus
LKHFGLQLS

SEQ ID NO: 22131 - protein, 9 aa, BK virus
KHFGLQLSL

SEQ ID NO: 22132 - protein, 9 aa, BK virus
HFGLQLSLF

SEQ ID NO: 22133 - protein, 9 aa, BK virus
FGLQLSLFV

SEQ ID NO: 22134 - protein, 9 aa, BK virus
GLQLSLFVN

SEQ ID NO: 22135 - protein, 9 aa, BK virus
LQLSLFVNI

SEQ ID NO: 22136 - protein, 9 aa, BK virus
QLSLFVNIS

SEQ ID NO: 22137 - protein, 9 aa, BK virus
LSLFVNISY

SEQ ID NO: 22138 - protein, 9 aa, BK virus
SLFVNISYH

SEQ ID NO: 22139 - protein, 9 aa, BK virus
LFVNISYHI

SEQ ID NO: 22140 - protein, 9 aa, BK virus
FVNISYHIW

SEQ ID NO: 22141 - protein, 9 aa, BK virus
VNISYHIWV

SEQ ID NO: 22142 - protein, 9 aa, BK virus
NISYHIWVP

SEQ ID NO: 22143 - protein, 9 aa, BK virus
ISYHIWVPW

SEQ ID NO: 22144 - protein, 9 aa, BK virus
SYHIWVPWK

SEQ ID NO: 22145 - protein, 9 aa, BK virus
YHIWVPWKS

SEQ ID NO: 22146 - protein, 9 aa, BK virus
HIWVPWKSF

SEQ ID NO: 22147 - protein, 9 aa, BK virus
IWVPWKSFC

SEQ ID NO: 22148 - protein, 9 aa, BK virus
WVPWKSFCA

SEQ ID NO: 22149 - protein, 9 aa, BK virus
VPWKSFCAI

SEQ ID NO: 22150 - protein, 9 aa, BK virus
PWKSFCAIK

SEQ ID NO: 22151 - protein, 9 aa, BK virus
WKSFCAIKH

SEQ ID NO: 22152 - protein, 9 aa, BK virus
KSFCAIKHP

SEQ ID NO: 22153 - protein, 9 aa, BK virus
SFCAIKHPN

SEQ ID NO: 22154 - protein, 9 aa, BK virus
FCAIKHPNL

SEQ ID NO: 22155 - protein, 9 aa, BK virus
CAIKHPNLF

SEQ ID NO: 22156 - protein, 9 aa, BK virus
AIKHPNLFY

SEQ ID NO: 22157 - protein, 9 aa, BK virus
IKHPNLFYL

SEQ ID NO: 22158 - protein, 9 aa, BK virus
KHPNLFYLG

SEQ ID NO: 22159 - protein, 9 aa, BK virus
HPNLFYLGF

SEQ ID NO: 22160 - protein, 9 aa, BK virus
PNLFYLGFH

SEQ ID NO: 22161 - protein, 9 aa, BK virus
NLFYLGFHT

SEQ ID NO: 22162 - protein, 9 aa, BK virus
LFYLGFHTI

SEQ ID NO: 22163 - protein, 9 aa, BK virus
FYLGFHTIH

SEQ ID NO: 22164 - protein, 9 aa, BK virus
YLGFHTIHR

SEQ ID NO: 22165 - protein, 9 aa, BK virus
LGFHTIHRL

SEQ ID NO: 22166 - protein, 9 aa, BK virus
GFHTIHRLP

SEQ ID NO: 22167 - protein, 9 aa, BK virus
FHTIHRLPI

SEQ ID NO: 22168 - protein, 9 aa, BK virus
HTIHRLPIH

SEQ ID NO: 22169 - protein, 9 aa, BK virus
TIHRLPIHS

SEQ ID NO: 22170 - protein, 9 aa, BK virus
IHRLPIHSL

SEQ ID NO: 22171 - protein, 9 aa, BK virus
HRLPIHSLG

SEQ ID NO: 22172 - protein, 9 aa, BK virus
RLPIHSLGS

SEQ ID NO: 22173 - protein, 9 aa, BK virus
LPIHSLGSP

SEQ ID NO: 22174 - protein, 9 aa, BK virus
PIHSLGSPV

SEQ ID NO: 22175 - protein, 9 aa, BK virus
IHSLGSPVY

SEQ ID NO: 22176 - protein, 9 aa, BK virus
HSLGSPVYK

SEQ ID NO: 22177 - protein, 9 aa, BK virus
SLGSPVYKV

SEQ ID NO: 22178 - protein, 9 aa, BK virus
LGSPVYKVT

SEQ ID NO: 22179 - protein, 9 aa, BK virus
QKGNWVRIL

SEQ ID NO: 22180 - protein, 9 aa, BK virus
KGNWVRILY

SEQ ID NO: 22181 - protein, 9 aa, BK virus
GNWVRILYR

SEQ ID NO: 22182 - protein, 9 aa, BK virus
NWVRILYRS

SEQ ID NO: 22183 - protein, 9 aa, BK virus
WVRILYRSF

SEQ ID NO: 22184 - protein, 9 aa, BK virus
VRILYRSFS

SEQ ID NO: 22185 - protein, 9 aa, BK virus
RILYRSFSQ

SEQ ID NO: 22186 - protein, 9 aa, BK virus
ILYRSFSQA

SEQ ID NO: 22187 - protein, 9 aa, BK virus
LYRSFSQAD

SEQ ID NO: 22188 - protein, 9 aa, BK virus
YRSFSQADL

SEQ ID NO: 22189 - protein, 9 aa, BK virus
RSFSQADLK

SEQ ID NO: 22190 - protein, 9 aa, BK virus
SFSQADLKI

SEQ ID NO: 22191 - protein, 9 aa, BK virus
FSQADLKIS

SEQ ID NO: 22192 - protein, 9 aa, BK virus
SQADLKISC

SEQ ID NO: 22193 - protein, 9 aa, BK virus
QADLKISCK

SEQ ID NO: 22194 - protein, 9 aa, BK virus
ADLKISCKA

SEQ ID NO: 22195 - protein, 9 aa, BK virus
DLKISCKAS

SEQ ID NO: 22196 - protein, 9 aa, BK virus
LKISCKASP

SEQ ID NO: 22197 - protein, 9 aa, BK virus
KISCKASPL

SEQ ID NO: 22198 - protein, 9 aa, BK virus
ISCKASPLL

SEQ ID NO: 22199 - protein, 9 aa, BK virus
SCKASPLLC

SEQ ID NO: 22200 - protein, 9 aa, BK virus
CKASPLLCS

SEQ ID NO: 22201 - protein, 9 aa, BK virus
KASPLLCSR

SEQ ID NO: 22202 - protein, 9 aa, BK virus
ASPLLCSRA

SEQ ID NO: 22203 - protein, 9 aa, BK virus
SPLLCSRAV

SEQ ID NO: 22204 - protein, 9 aa, BK virus
PLLCSRAVS

SEQ ID NO: 22205 - protein, 9 aa, BK virus
LLCSRAVSK

SEQ ID NO: 22206 - protein, 9 aa, BK virus
LCSRAVSKQ

SEQ ID NO: 22207 - protein, 9 aa, BK virus
CSRAVSKQA

SEQ ID NO: 22208 - protein, 9 aa, BK virus
SRAVSKQAT

SEQ ID NO: 22209 - protein, 9 aa, BK virus
RAVSKQATN

SEQ ID NO: 22210 - protein, 9 aa, BK virus
AVSKQATNI

SEQ ID NO: 22211 - protein, 9 aa, BK virus
VSKQATNIS

SEQ ID NO: 22212 - protein, 9 aa, BK virus
SKQATNISS

SEQ ID NO: 22213 - protein, 9 aa, BK virus
NIQAISFTK

SEQ ID NO: 22214 - protein, 9 aa, BK virus
IQAISFTKR

SEQ ID NO: 22215 - protein, 9 aa, BK virus
QAISFTKRP

SEQ ID NO: 22216 - protein, 9 aa, BK virus
AISFTKRPH

SEQ ID NO: 22217 - protein, 9 aa, BK virus
ISFTKRPHT

SEQ ID NO: 22218 - protein, 9 aa, BK virus
SFTKRPHTL

SEQ ID NO: 22219 - protein, 9 aa, BK virus
FTKRPHTLF

SEQ ID NO: 22220 - protein, 9 aa, BK virus
TKRPHTLFI

SEQ ID NO: 22221 - protein, 9 aa, BK virus
QHCGSCVGH

SEQ ID NO: 22222 - protein, 9 aa, BK virus
HCGSCVGHM

SEQ ID NO: 22223 - protein, 9 aa, BK virus
CGSCVGHMK

SEQ ID NO: 22224 - protein, 9 aa, BK virus
GSCVGHMKY

SEQ ID NO: 22225 - protein, 9 aa, BK virus
SCVGHMKYW

SEQ ID NO: 22226 - protein, 9 aa, BK virus
CVGHMKYWG

SEQ ID NO: 22227 - protein, 9 aa, BK virus
VGHMKYWGN

SEQ ID NO: 22228 - protein, 9 aa, BK virus
GHMKYWGNI

SEQ ID NO: 22229 - protein, 9 aa, BK virus
HMKYWGNIF

SEQ ID NO: 22230 - protein, 9 aa, BK virus
MKYWGNIFP

SEQ ID NO: 22231 - protein, 9 aa, BK virus
KYWGNIFPS

SEQ ID NO: 22232 - protein, 9 aa, BK virus
YWGNIFPSC

SEQ ID NO: 22233 - protein, 9 aa, BK virus
WGNIFPSCE

SEQ ID NO: 22234 - protein, 9 aa, BK virus
GNIFPSCES

SEQ ID NO: 22235 - protein, 9 aa, BK virus
NIFPSCESP

SEQ ID NO: 22236 - protein, 9 aa, BK virus
IFPSCESPK

SEQ ID NO: 22237 - protein, 9 aa, BK virus
FPSCESPKI

SEQ ID NO: 22238 - protein, 9 aa, BK virus
PSCESPKIP

SEQ ID NO: 22239 - protein, 9 aa, BK virus
SCESPKIPS

SEQ ID NO: 22240 - protein, 9 aa, BK virus
CESPKIPSI

SEQ ID NO: 22241 - protein, 9 aa, BK virus
ESPKIPSIF

SEQ ID NO: 22242 - protein, 9 aa, BK virus
SPKIPSIFI

SEQ ID NO: 22243 - protein, 9 aa, BK virus
PKIPSIFIS

SEQ ID NO: 22244 - protein, 9 aa, BK virus
KIPSIFIST

SEQ ID NO: 22245 - protein, 9 aa, BK virus
IPSIFISTG

SEQ ID NO: 22246 - protein, 9 aa, BK virus
PSIFISTGI

SEQ ID NO: 22247 - protein, 9 aa, BK virus
SIFISTGIR

SEQ ID NO: 22248 - protein, 9 aa, BK virus
IFISTGIRY

SEQ ID NO: 22249 - protein, 9 aa, BK virus
FISTGIRYP

SEQ ID NO: 22250 - protein, 9 aa, BK virus
ISTGIRYPA

SEQ ID NO: 22251 - protein, 9 aa, BK virus
STGIRYPAL

SEQ ID NO: 22252 - protein, 9 aa, BK virus
TGIRYPALN

SEQ ID NO: 22253 - protein, 9 aa, BK virus
GIRYPALNW

SEQ ID NO: 22254 - protein, 9 aa, BK virus
IRYPALNWI

SEQ ID NO: 22255 - protein, 9 aa, BK virus
RYPALNWIS

SEQ ID NO: 22256 - protein, 9 aa, BK virus
YPALNWISI

SEQ ID NO: 22257 - protein, 9 aa, BK virus
PALNWISIV

SEQ ID NO: 22258 - protein, 9 aa, BK virus
ALNWISIVF

SEQ ID NO: 22259 - protein, 9 aa, BK virus
LNWISIVFV

SEQ ID NO: 22260 - protein, 9 aa, BK virus
NWISIVFVQ

SEQ ID NO: 22261 - protein, 9 aa, BK virus
WISIVFVQI

SEQ ID NO: 22262 - protein, 9 aa, BK virus
ISIVFVQIG

SEQ ID NO: 22263 - protein, 9 aa, BK virus
SIVFVQIGL

SEQ ID NO: 22264 - protein, 9 aa, BK virus
IVFVQIGLM

SEQ ID NO: 22265 - protein, 9 aa, BK virus
VFVQIGLMV

SEQ ID NO: 22266 - protein, 9 aa, BK virus
FVQIGLMVS

SEQ ID NO: 22267 - protein, 9 aa, BK virus
VQIGLMVSI

SEQ ID NO: 22268 - protein, 9 aa, BK virus
QIGLMVSIH

SEQ ID NO: 22269 - protein, 9 aa, BK virus
IGLMVSIHY

SEQ ID NO: 22270 - protein, 9 aa, BK virus
GLMVSIHYL

SEQ ID NO: 22271 - protein, 9 aa, BK virus
LMVSIHYLG

SEQ ID NO: 22272 - protein, 9 aa, BK virus
MVSIHYLGL

SEQ ID NO: 22273 - protein, 9 aa, BK virus
VSIHYLGLG

SEQ ID NO: 22274 - protein, 9 aa, BK virus
SIHYLGLGC

SEQ ID NO: 22275 - protein, 9 aa, BK virus
IHYLGLGCW

SEQ ID NO: 22276 - protein, 9 aa, BK virus
HYLGLGCWV

SEQ ID NO: 22277 - protein, 9 aa, BK virus
YLGLGCWVF

SEQ ID NO: 22278 - protein, 9 aa, BK virus
LGLGCWVFR

SEQ ID NO: 22279 - protein, 9 aa, BK virus
GLGCWVFRG

SEQ ID NO: 22280 - protein, 9 aa, BK virus
LGCWVFRGY

SEQ ID NO: 22281 - protein, 9 aa, BK virus
GCWVFRGYS

SEQ ID NO: 22282 - protein, 9 aa, BK virus
CWVFRGYST

SEQ ID NO: 22283 - protein, 9 aa, BK virus
WVFRGYSTI

SEQ ID NO: 22284 - protein, 9 aa, BK virus
VFRGYSTIR

SEQ ID NO: 22285 - protein, 9 aa, BK virus
FRGYSTIRV

SEQ ID NO: 22286 - protein, 9 aa, BK virus
RGYSTIRVL

SEQ ID NO: 22287 - protein, 9 aa, BK virus
HSLHFQGFS

SEQ ID NO: 22288 - protein, 9 aa, BK virus
SLHFQGFST

SEQ ID NO: 22289 - protein, 9 aa, BK virus
LHFQGFSTY

SEQ ID NO: 22290 - protein, 9 aa, BK virus
HFQGFSTYS

SEQ ID NO: 22291 - protein, 9 aa, BK virus
FQGFSTYSK

SEQ ID NO: 22292 - protein, 9 aa, BK virus
QGFSTYSKE

SEQ ID NO: 22293 - protein, 9 aa, BK virus
GFSTYSKEV

SEQ ID NO: 22294 - protein, 9 aa, BK virus
FSTYSKEVE

SEQ ID NO: 22295 - protein, 9 aa, BK virus
STYSKEVEI

SEQ ID NO: 22296 - protein, 9 aa, BK virus
TYSKEVEIT

SEQ ID NO: 22297 - protein, 9 aa, BK virus
YSKEVEITA

SEQ ID NO: 22298 - protein, 9 aa, BK virus
SKEVEITAL

SEQ ID NO: 22299 - protein, 9 aa, BK virus
KEVEITALN

SEQ ID NO: 22300 - protein, 9 aa, BK virus
EVEITALNR

SEQ ID NO: 22301 - protein, 9 aa, BK virus
VEITALNRF

SEQ ID NO: 22302 - protein, 9 aa, BK virus
EITALNRFS

SEQ ID NO: 22303 - protein, 9 aa, BK virus
ITALNRFSS

SEQ ID NO: 22304 - protein, 9 aa, BK virus
TALNRFSST

SEQ ID NO: 22305 - protein, 9 aa, BK virus
ALNRFSSTM

SEQ ID NO: 22306 - protein, 9 aa, BK virus
LNRFSSTML

SEQ ID NO: 22307 - protein, 9 aa, BK virus
NRFSSTMLM

SEQ ID NO: 22308 - protein, 9 aa, BK virus
RFSSTMLMH

SEQ ID NO: 22309 - protein, 9 aa, BK virus
FSSTMLMHF

SEQ ID NO: 22310 - protein, 9 aa, BK virus
SSTMLMHFL

SEQ ID NO: 22311 - protein, 9 aa, BK virus
PCMKVKHAS

SEQ ID NO: 22312 - protein, 9 aa, BK virus
CMKVKHASY

SEQ ID NO: 22313 - protein, 9 aa, BK virus
MKVKHASYS

SEQ ID NO: 22314 - protein, 9 aa, BK virus
KVKHASYSN

SEQ ID NO: 22315 - protein, 9 aa, BK virus
VKHASYSNN

SEQ ID NO: 22316 - protein, 9 aa, BK virus
KHASYSNNL

SEQ ID NO: 22317 - protein, 9 aa, BK virus
HASYSNNLC

SEQ ID NO: 22318 - protein, 9 aa, BK virus
ASYSNNLCL

SEQ ID NO: 22319 - protein, 9 aa, BK virus
SYSNNLCLY

SEQ ID NO: 22320 - protein, 9 aa, BK virus
YSNNLCLYS

SEQ ID NO: 22321 - protein, 9 aa, BK virus
SNNLCLYSY

SEQ ID NO: 22322 - protein, 9 aa, BK virus
NNLCLYSYS

SEQ ID NO: 22323 - protein, 9 aa, BK virus
NLCLYSYSL

SEQ ID NO: 22324 - protein, 9 aa, BK virus
LCLYSYSLP

SEQ ID NO: 22325 - protein, 9 aa, BK virus
CLYSYSLPH

SEQ ID NO: 22326 - protein, 9 aa, BK virus
LYSYSLPHQ

SEQ ID NO: 22327 - protein, 9 aa, BK virus
IGEGNSCCA

SEQ ID NO: 22328 - protein, 9 aa, BK virus
GEGNSCCAV

SEQ ID NO: 22329 - protein, 9 aa, BK virus
EGNSCCAVT

SEQ ID NO: 22330 - protein, 9 aa, BK virus
GNSCCAVTG

SEQ ID NO: 22331 - protein, 9 aa, BK virus
NSCCAVTGK

SEQ ID NO: 22332 - protein, 9 aa, BK virus
SCCAVTGKH

SEQ ID NO: 22333 - protein, 9 aa, BK virus
CCAVTGKHF

SEQ ID NO: 22334 - protein, 9 aa, BK virus
CAVTGKHFS

SEQ ID NO: 22335 - protein, 9 aa, BK virus
AVTGKHFSL

SEQ ID NO: 22336 - protein, 9 aa, BK virus
VTGKHFSLW

SEQ ID NO: 22337 - protein, 9 aa, BK virus
TGKHFSLWA

SEQ ID NO: 22338 - protein, 9 aa, BK virus
GKHFSLWAI

SEQ ID NO: 22339 - protein, 9 aa, BK virus
KHFSLWAIT

SEQ ID NO: 22340 - protein, 9 aa, BK virus
HFSLWAITA

SEQ ID NO: 22341 - protein, 9 aa, BK virus
FSLWAITAK

SEQ ID NO: 22342 - protein, 9 aa, BK virus
SLWAITAKV

SEQ ID NO: 22343 - protein, 9 aa, BK virus
LWAITAKVI

SEQ ID NO: 22344 - protein, 9 aa, BK virus
WAITAKVIF

SEQ ID NO: 22345 - protein, 9 aa, BK virus
AITAKVIFS

SEQ ID NO: 22346 - protein, 9 aa, BK virus
ITAKVIFST

SEQ ID NO: 22347 - protein, 9 aa, BK virus
TKAPKVFIW

SEQ ID NO: 22348 - protein, 9 aa, BK virus
KAPKVFIWI

SEQ ID NO: 22349 - protein, 9 aa, BK virus
APKVFIWIP

SEQ ID NO: 22350 - protein, 9 aa, BK virus
PKVFIWIPH

SEQ ID NO: 22351 - protein, 9 aa, BK virus
KVFIWIPHF

SEQ ID NO: 22352 - protein, 9 aa, BK virus
VFIWIPHFW

SEQ ID NO: 22353 - protein, 9 aa, BK virus
FIWIPHFWV

SEQ ID NO: 22354 - protein, 9 aa, BK virus
EAFYLCNSI

SEQ ID NO: 22355 - protein, 9 aa, BK virus
AFYLCNSIY

SEQ ID NO: 22356 - protein, 9 aa, BK virus
FYLCNSIYP

SEQ ID NO: 22357 - protein, 9 aa, BK virus
YLCNSIYPS

SEQ ID NO: 22358 - protein, 9 aa, BK virus
LCNSIYPSF

SEQ ID NO: 22359 - protein, 9 aa, BK virus
CNSIYPSFN

SEQ ID NO: 22360 - protein, 9 aa, BK virus
NSIYPSFNF

SEQ ID NO: 22361 - protein, 9 aa, BK virus
FWHLHGFLW

SEQ ID NO: 22362 - protein, 9 aa, BK virus
WHLHGFLWL

SEQ ID NO: 22363 - protein, 9 aa, BK virus
HLHGFLWLF

SEQ ID NO: 22364 - protein, 9 aa, BK virus
LHGFLWLFG

SEQ ID NO: 22365 - protein, 9 aa, BK virus
HGFLWLFGS

SEQ ID NO: 22366 - protein, 9 aa, BK virus
GFLWLFGSC

SEQ ID NO: 22367 - protein, 9 aa, BK virus
FLWLFGSCP

SEQ ID NO: 22368 - protein, 9 aa, BK virus
LWLFGSCPW

SEQ ID NO: 22369 - protein, 9 aa, BK virus
WLFGSCPWT

SEQ ID NO: 22370 - protein, 9 aa, BK virus
LFGSCPWTL

SEQ ID NO: 22371 - protein, 9 aa, BK virus
FGSCPWTLS

SEQ ID NO: 22372 - protein, 9 aa, BK virus
GSCPWTLSF

SEQ ID NO: 22373 - protein, 9 aa, BK virus
SCPWTLSFS

SEQ ID NO: 22374 - protein, 9 aa, BK virus
CPWTLSFSF

SEQ ID NO: 22375 - protein, 9 aa, BK virus
PWTLSFSFG

SEQ ID NO: 22376 - protein, 9 aa, BK virus
WTLSFSFGW

SEQ ID NO: 22377 - protein, 9 aa, BK virus
TLSFSFGWG

SEQ ID NO: 22378 - protein, 9 aa, BK virus
LSFSFGWGH

SEQ ID NO: 22379 - protein, 9 aa, BK virus
SFSFGWGHL

SEQ ID NO: 22380 - protein, 9 aa, BK virus
FSFGWGHLH

SEQ ID NO: 22381 - protein, 9 aa, BK virus
SFGWGHLHM

SEQ ID NO: 22382 - protein, 9 aa, BK virus
FGWGHLHML

SEQ ID NO: 22383 - protein, 9 aa, BK virus
GWGHLHMLQ

SEQ ID NO: 22384 - protein, 9 aa, BK virus
WGHLHMLQE

SEQ ID NO: 22385 - protein, 9 aa, BK virus
GHLHMLQEQ

SEQ ID NO: 22386 - protein, 9 aa, BK virus
HLHMLQEQV

SEQ ID NO: 22387 - protein, 9 aa, BK virus
LHMLQEQVL

SEQ ID NO: 22388 - protein, 9 aa, BK virus
HMLQEQVLQ

SEQ ID NO: 22389 - protein, 9 aa, BK virus
MLQEQVLQS

SEQ ID NO: 22390 - protein, 9 aa, BK virus
LQEQVLQSR

SEQ ID NO: 22391 - protein, 9 aa, BK virus
QEQVLQSRT

SEQ ID NO: 22392 - protein, 9 aa, BK virus
EQVLQSRTG

SEQ ID NO: 22393 - protein, 9 aa, BK virus
QVLQSRTGL

SEQ ID NO: 22394 - protein, 9 aa, BK virus
VLQSRTGLE

SEQ ID NO: 22395 - protein, 9 aa, BK virus
LQSRTGLEV

SEQ ID NO: 22396 - protein, 9 aa, BK virus
QSRTGLEVK

SEQ ID NO: 22397 - protein, 9 aa, BK virus
SRTGLEVKA

SEQ ID NO: 22398 - protein, 9 aa, BK virus
RTGLEVKAT

SEQ ID NO: 22399 - protein, 9 aa, BK virus
TGLEVKATS

SEQ ID NO: 22400 - protein, 9 aa, BK virus
GLEVKATSI

SEQ ID NO: 22401 - protein, 9 aa, BK virus
LEVKATSIE

SEQ ID NO: 22402 - protein, 9 aa, BK virus
EVKATSIEE

SEQ ID NO: 22403 - protein, 9 aa, BK virus
VKATSIEEQ

SEQ ID NO: 22404 - protein, 9 aa, BK virus
KATSIEEQF

SEQ ID NO: 22405 - protein, 9 aa, BK virus
ATSIEEQFF

SEQ ID NO: 22406 - protein, 9 aa, BK virus
TSIEEQFFD

SEQ ID NO: 22407 - protein, 9 aa, BK virus
TLLNVHFVD

SEQ ID NO: 22408 - protein, 9 aa, BK virus
LLNVHFVDF

SEQ ID NO: 22409 - protein, 9 aa, BK virus
LNVHFVDFL

SEQ ID NO: 22410 - protein, 9 aa, BK virus
NVHFVDFLS

SEQ ID NO: 22411 - protein, 9 aa, BK virus
VHFVDFLSP

SEQ ID NO: 22412 - protein, 9 aa, BK virus
HFVDFLSPF

SEQ ID NO: 22413 - protein, 9 aa, BK virus
FVDFLSPFF

SEQ ID NO: 22414 - protein, 9 aa, BK virus
VDFLSPFFV

SEQ ID NO: 22415 - protein, 9 aa, BK virus
LLLYCQHHL

SEQ ID NO: 22416 - protein, 9 aa, BK virus
LLYCQHHLY

SEQ ID NO: 22417 - protein, 9 aa, BK virus
LYCQHHLYY

SEQ ID NO: 22418 - protein, 9 aa, BK virus
YCQHHLYYK

SEQ ID NO: 22419 - protein, 9 aa, BK virus
CQHHLYYKY

SEQ ID NO: 22420 - protein, 9 aa, BK virus
QHHLYYKYG

SEQ ID NO: 22421 - protein, 9 aa, BK virus
HHLYYKYGQ

SEQ ID NO: 22422 - protein, 9 aa, BK virus
HLYYKYGQN

SEQ ID NO: 22423 - protein, 9 aa, BK virus
LYYKYGQNV

SEQ ID NO: 22424 - protein, 9 aa, BK virus
YYKYGQNVH

SEQ ID NO: 22425 - protein, 9 aa, BK virus
YKYGQNVHG

SEQ ID NO: 22426 - protein, 9 aa, BK virus
KYGQNVHGY

SEQ ID NO: 22427 - protein, 9 aa, BK virus
YGQNVHGYL

SEQ ID NO: 22428 - protein, 9 aa, BK virus
GQNVHGYLP

SEQ ID NO: 22429 - protein, 9 aa, BK virus
QNVHGYLPF

SEQ ID NO: 22430 - protein, 9 aa, BK virus
NVHGYLPFQ

SEQ ID NO: 22431 - protein, 9 aa, BK virus
VHGYLPFQL

SEQ ID NO: 22432 - protein, 9 aa, BK virus
HGYLPFQLL

SEQ ID NO: 22433 - protein, 9 aa, BK virus
GYLPFQLLV

SEQ ID NO: 22434 - protein, 9 aa, BK virus
GKDQNNIVE

SEQ ID NO: 22435 - protein, 9 aa, BK virus
KDQNNIVEY

SEQ ID NO: 22436 - protein, 9 aa, BK virus
DQNNIVEYN

SEQ ID NO: 22437 - protein, 9 aa, BK virus
QNNIVEYNY

SEQ ID NO: 22438 - protein, 9 aa, BK virus
NNIVEYNYK

SEQ ID NO: 22439 - protein, 9 aa, BK virus
NIVEYNYKS

SEQ ID NO: 22440 - protein, 9 aa, BK virus
IVEYNYKSL

SEQ ID NO: 22441 - protein, 9 aa, BK virus
KIFLFFSAI

SEQ ID NO: 22442 - protein, 9 aa, BK virus
IFLFFSAIP

SEQ ID NO: 22443 - protein, 9 aa, BK virus
FLFFSAIPV

SEQ ID NO: 22444 - protein, 9 aa, BK virus
LFFSAIPVR

SEQ ID NO: 22445 - protein, 9 aa, BK virus
FFSAIPVRL

SEQ ID NO: 22446 - protein, 9 aa, BK virus
QKYLHQETE

SEQ ID NO: 22447 - protein, 9 aa, BK virus
KYLHQETEY

SEQ ID NO: 22448 - protein, 9 aa, BK virus
YLHQETEYH

SEQ ID NO: 22449 - protein, 9 aa, BK virus
LHQETEYHS

SEQ ID NO: 22450 - protein, 9 aa, BK virus
HQETEYHST

SEQ ID NO: 22451 - protein, 9 aa, BK virus
QETEYHSTH

SEQ ID NO: 22452 - protein, 9 aa, BK virus
ETEYHSTHL

SEQ ID NO: 22453 - protein, 9 aa, BK virus
TEYHSTHLG

SEQ ID NO: 22454 - protein, 9 aa, BK virus
TIPKPCLIA

SEQ ID NO: 22455 - protein, 9 aa, BK virus
IPKPCLIAD

SEQ ID NO: 22456 - protein, 9 aa, BK virus
PKPCLIADR

SEQ ID NO: 22457 - protein, 9 aa, BK virus
KPCLIADRG

SEQ ID NO: 22458 - protein, 9 aa, BK virus
PCLIADRGL

SEQ ID NO: 22459 - protein, 9 aa, BK virus
CLIADRGLQ

SEQ ID NO: 22460 - protein, 9 aa, BK virus
LIADRGLQW

SEQ ID NO: 22461 - protein, 9 aa, BK virus
IADRGLQWK

SEQ ID NO: 22462 - protein, 9 aa, BK virus
ADRGLQWKL

SEQ ID NO: 22463 - protein, 9 aa, BK virus
DRGLQWKLC

SEQ ID NO: 22464 - protein, 9 aa, BK virus
RGLQWKLCD

SEQ ID NO: 22465 - protein, 9 aa, BK virus
GLQWKLCDP

SEQ ID NO: 22466 - protein, 9 aa, BK virus
LQWKLCDPN

SEQ ID NO: 22467 - protein, 9 aa, BK virus
QWKLCDPNH

SEQ ID NO: 22468 - protein, 9 aa, BK virus
WKLCDPNHQ

SEQ ID NO: 22469 - protein, 9 aa, BK virus
KLCDPNHQR

SEQ ID NO: 22470 - protein, 9 aa, BK virus
LCDPNHQRT

SEQ ID NO: 22471 - protein, 9 aa, BK virus
CDPNHQRTY

SEQ ID NO: 22472 - protein, 9 aa, BK virus
DPNHQRTYT

SEQ ID NO: 22473 - protein, 9 aa, BK virus
PNHQRTYTL

SEQ ID NO: 22474 - protein, 9 aa, BK virus
NHQRTYTLL

SEQ ID NO: 22475 - protein, 9 aa, BK virus
HQRTYTLLE

SEQ ID NO: 22476 - protein, 9 aa, BK virus
QRTYTLLEL

SEQ ID NO: 22477 - protein, 9 aa, BK virus
RTYTLLELR

SEQ ID NO: 22478 - protein, 9 aa, BK virus
TYTLLELRN

SEQ ID NO: 22479 - protein, 9 aa, BK virus
QFELKQQTQ

SEQ ID NO: 22480 - protein, 9 aa, BK virus
FELKQQTQQ

SEQ ID NO: 22481 - protein, 9 aa, BK virus
PQEHQQLQH

SEQ ID NO: 22482 - protein, 9 aa, BK virus
QEHQQLQHM

SEQ ID NO: 22483 - protein, 9 aa, BK virus
EHQQLQHMF

SEQ ID NO: 22484 - protein, 9 aa, BK virus
HQQLQHMFE

SEQ ID NO: 22485 - protein, 9 aa, BK virus
QQLQHMFEE

SEQ ID NO: 22486 - protein, 9 aa, BK virus
QLQHMFEEL

SEQ ID NO: 22487 - protein, 9 aa, BK virus
LQHMFEELG

SEQ ID NO: 22488 - protein, 9 aa, BK virus
QHMFEELGL

SEQ ID NO: 22489 - protein, 9 aa, BK virus
PLRYLLCPL

SEQ ID NO: 22490 - protein, 9 aa, BK virus
LRYLLCPLQ

SEQ ID NO: 22491 - protein, 9 aa, BK virus
QQQPPQQQF

SEQ ID NO: 22492 - protein, 9 aa, BK virus
QQPPQQQFQ

SEQ ID NO: 22493 - protein, 9 aa, BK virus
QPPQQQFQP

SEQ ID NO: 22494 - protein, 9 aa, BK virus
PPQQQFQPL

SEQ ID NO: 22495 - protein, 9 aa, BK virus
PQQQFQPLK

SEQ ID NO: 22496 - protein, 9 aa, BK virus
QQQFQPLKI

SEQ ID NO: 22497 - protein, 9 aa, BK virus
QQFQPLKIL

SEQ ID NO: 22498 - protein, 9 aa, BK virus
QFQPLKILW

SEQ ID NO: 22499 - protein, 9 aa, BK virus
FQPLKILWQ

SEQ ID NO: 22500 - protein, 9 aa, BK virus
QPLKILWQQ

SEQ ID NO: 22501 - protein, 9 aa, BK virus
PLKILWQQQ

SEQ ID NO: 22502 - protein, 9 aa, BK virus
LKILWQQQP

SEQ ID NO: 22503 - protein, 9 aa, BK virus
KILWQQQPQ

SEQ ID NO: 22504 - protein, 9 aa, BK virus
ILWQQQPQI

SEQ ID NO: 22505 - protein, 9 aa, BK virus
LWQQQPQIH

SEQ ID NO: 22506 - protein, 9 aa, BK virus
WQQQPQIHW

SEQ ID NO: 22507 - protein, 9 aa, BK virus
QQQPQIHWQ

SEQ ID NO: 22508 - protein, 9 aa, BK virus
QQPQIHWQL

SEQ ID NO: 22509 - protein, 9 aa, BK virus
QPQIHWQLG

SEQ ID NO: 22510 - protein, 9 aa, BK virus
PQIHWQLGP

SEQ ID NO: 22511 - protein, 9 aa, BK virus
QIHWQLGPP

SEQ ID NO: 22512 - protein, 9 aa, BK virus
IHWQLGPPK

SEQ ID NO: 22513 - protein, 9 aa, BK virus
HWQLGPPKV

SEQ ID NO: 22514 - protein, 9 aa, BK virus
WQLGPPKVL

SEQ ID NO: 22515 - protein, 9 aa, BK virus
QLGPPKVLE

SEQ ID NO: 22516 - protein, 9 aa, BK virus
LGPPKVLEQ

SEQ ID NO: 22517 - protein, 9 aa, BK virus
GPPKVLEQH

SEQ ID NO: 22518 - protein, 9 aa, BK virus
PPKVLEQHP

SEQ ID NO: 22519 - protein, 9 aa, BK virus
TWKYKKKGI

SEQ ID NO: 22520 - protein, 9 aa, BK virus
WKYKKKGIT

SEQ ID NO: 22521 - protein, 9 aa, BK virus
KYKKKGITY

SEQ ID NO: 22522 - protein, 9 aa, BK virus
YKKKGITYL

SEQ ID NO: 22523 - protein, 9 aa, BK virus
KKKGITYLG

SEQ ID NO: 22524 - protein, 9 aa, BK virus
KKGITYLGV

SEQ ID NO: 22525 - protein, 9 aa, BK virus
KGITYLGVF

SEQ ID NO: 22526 - protein, 9 aa, BK virus
GITYLGVFY

SEQ ID NO: 22527 - protein, 9 aa, BK virus
ITYLGVFYR

SEQ ID NO: 22528 - protein, 9 aa, BK virus
TYLGVFYRV

SEQ ID NO: 22529 - protein, 9 aa, BK virus
YLGVFYRVF

SEQ ID NO: 22530 - protein, 9 aa, BK virus
LGVFYRVFY

SEQ ID NO: 22531 - protein, 9 aa, BK virus
GVFYRVFYS

SEQ ID NO: 22532 - protein, 9 aa, BK virus
VFYRVFYSR

SEQ ID NO: 22533 - protein, 9 aa, BK virus
SSGTFVFPV

SEQ ID NO: 22534 - protein, 9 aa, BK virus
SGTFVFPVY

SEQ ID NO: 22535 - protein, 9 aa, BK virus
GTFVFPVYT

SEQ ID NO: 22536 - protein, 9 aa, BK virus
TFVFPVYTV

SEQ ID NO: 22537 - protein, 9 aa, BK virus
FVFPVYTVF

SEQ ID NO: 22538 - protein, 9 aa, BK virus
VFPVYTVFT

SEQ ID NO: 22539 - protein, 9 aa, BK virus
FPVYTVFTS

SEQ ID NO: 22540 - protein, 9 aa, BK virus
PVYTVFTST

SEQ ID NO: 22541 - protein, 9 aa, BK virus
VYTVFTSTK

SEQ ID NO: 22542 - protein, 9 aa, BK virus
YTVFTSTKF

SEQ ID NO: 22543 - protein, 9 aa, BK virus
TVFTSTKFQ

SEQ ID NO: 22544 - protein, 9 aa, BK virus
VFTSTKFQQ

SEQ ID NO: 22545 - protein, 9 aa, BK virus
FTSTKFQQK

SEQ ID NO: 22546 - protein, 9 aa, BK virus
TSTKFQQKL

SEQ ID NO: 22547 - protein, 9 aa, BK virus
NKNKNPLSS

SEQ ID NO: 22548 - protein, 9 aa, BK virus
KNKNPLSSF

SEQ ID NO: 22549 - protein, 9 aa, BK virus
NKNPLSSFF

SEQ ID NO: 22550 - protein, 9 aa, BK virus
KNPLSSFFC

SEQ ID NO: 22551 - protein, 9 aa, BK virus
NPLSSFFCS

SEQ ID NO: 22552 - protein, 9 aa, BK virus
PLSSFFCSS

SEQ ID NO: 22553 - protein, 9 aa, BK virus
LSSFFCSSP

SEQ ID NO: 22554 - protein, 9 aa, BK virus
SSFFCSSPG

SEQ ID NO: 22555 - protein, 9 aa, BK virus
SFFCSSPGF

SEQ ID NO: 22556 - protein, 9 aa, BK virus
FFCSSPGFT

SEQ ID NO: 22557 - protein, 9 aa, BK virus
FCSSPGFTN

SEQ ID NO: 22558 - protein, 9 aa, BK virus
CSSPGFTNF

SEQ ID NO: 22559 - protein, 9 aa, BK virus
SSPGFTNFH

SEQ ID NO: 22560 - protein, 9 aa, BK virus
QLAQNHGLC

SEQ ID NO: 22561 - protein, 9 aa, BK virus
LAQNHGLCP

SEQ ID NO: 22562 - protein, 9 aa, BK virus
AQNHGLCPV

SEQ ID NO: 22563 - protein, 9 aa, BK virus
LGTRPRFLG

SEQ ID NO: 22564 - protein, 9 aa, BK virus
GTRPRFLGS

SEQ ID NO: 22565 - protein, 9 aa, BK virus
TRPRFLGSQ

SEQ ID NO: 22566 - protein, 9 aa, BK virus
RPRFLGSQN

SEQ ID NO: 22567 - protein, 9 aa, BK virus
PRFLGSQNM

SEQ ID NO: 22568 - protein, 9 aa, BK virus
RFLGSQNMS

SEQ ID NO: 22569 - protein, 9 aa, BK virus
FLGSQNMSV

SEQ ID NO: 22570 - protein, 9 aa, BK virus
LGSQNMSVM

SEQ ID NO: 22571 - protein, 9 aa, BK virus
GSQNMSVMH

SEQ ID NO: 22572 - protein, 9 aa, BK virus
SQNMSVMHF

SEQ ID NO: 22573 - protein, 9 aa, BK virus
QNMSVMHFP

SEQ ID NO: 22574 - protein, 9 aa, BK virus
NMSVMHFPS

SEQ ID NO: 22575 - protein, 9 aa, BK virus
GHGLAAFHG

SEQ ID NO: 22576 - protein, 9 aa, BK virus
AAPPCESCT

SEQ ID NO: 22577 - protein, 9 aa, BK virus
APPCESCTF

SEQ ID NO: 22578 - protein, 9 aa, BK virus
PPCESCTFL

SEQ ID NO: 22579 - protein, 9 aa, BK virus
PCESCTFLP

SEQ ID NO: 22580 - protein, 9 aa, BK virus
CESCTFLPE

SEQ ID NO: 22581 - protein, 9 aa, BK virus
ESCTFLPEV

SEQ ID NO: 22582 - protein, 9 aa, BK virus
SCTFLPEVM

SEQ ID NO: 22583 - protein, 9 aa, BK virus
CTFLPEVMV

SEQ ID NO: 22584 - protein, 9 aa, BK virus
TFLPEVMVW

SEQ ID NO: 22585 - protein, 9 aa, BK virus
FLPEVMVWL

SEQ ID NO: 22586 - protein, 9 aa, BK virus
LPEVMVWLH

SEQ ID NO: 22587 - protein, 9 aa, BK virus
PEVMVWLHS

SEQ ID NO: 22588 - protein, 9 aa, BK virus
EVMVWLHSP

SEQ ID NO: 22589 - protein, 9 aa, BK virus
VMVWLHSPV

SEQ ID NO: 22590 - protein, 9 aa, BK virus
MVWLHSPVS

SEQ ID NO: 22591 - protein, 9 aa, BK virus
VWLHSPVSH

SEQ ID NO: 22592 - protein, 9 aa, BK virus
WLHSPVSHA

SEQ ID NO: 22593 - protein, 9 aa, BK virus
LHSPVSHAL

SEQ ID NO: 22594 - protein, 9 aa, BK virus
HSPVSHALS

SEQ ID NO: 22595 - protein, 9 aa, BK virus
SPVSHALSF

SEQ ID NO: 22596 - protein, 9 aa, BK virus
PVSHALSFL

SEQ ID NO: 22597 - protein, 9 aa, BK virus
VSHALSFLR

SEQ ID NO: 22598 - protein, 9 aa, BK virus
SHALSFLRS

SEQ ID NO: 22599 - protein, 9 aa, BK virus
HALSFLRSW

SEQ ID NO: 22600 - protein, 9 aa, BK virus
ALSFLRSWF

SEQ ID NO: 22601 - protein, 9 aa, BK virus
LSFLRSWFG

SEQ ID NO: 22602 - protein, 9 aa, BK virus
SFLRSWFGC

SEQ ID NO: 22603 - protein, 9 aa, BK virus
FLRSWFGCI

SEQ ID NO: 22604 - protein, 9 aa, BK virus
LRSWFGCIP

SEQ ID NO: 22605 - protein, 9 aa, BK virus
RSWFGCIPW

SEQ ID NO: 22606 - protein, 9 aa, BK virus
SWFGCIPWV

SEQ ID NO: 22607 - protein, 9 aa, BK virus
WFGCIPWVS

SEQ ID NO: 22608 - protein, 9 aa, BK virus
FGCIPWVSS

SEQ ID NO: 22609 - protein, 9 aa, BK virus
GCIPWVSSS

SEQ ID NO: 22610 - protein, 9 aa, BK virus
CIPWVSSSS

SEQ ID NO: 22611 - protein, 9 aa, BK virus
IPWVSSSSL

SEQ ID NO: 22612 - protein, 9 aa, BK virus
PWVSSSSLW

SEQ ID NO: 22613 - protein, 9 aa, BK virus
WVSSSSLWP

SEQ ID NO: 22614 - protein, 9 aa, BK virus
VSSSSLWPF

SEQ ID NO: 22615 - protein, 9 aa, BK virus
SSSSLWPFF

SEQ ID NO: 22616 - protein, 9 aa, BK virus
SSSLWPFFL

SEQ ID NO: 22617 - protein, 9 aa, BK virus
YIRGRGRLC

SEQ ID NO: 22618 - protein, 9 aa, BK virus
IRGRGRLCL

SEQ ID NO: 22619 - protein, 9 aa, BK virus
RGRGRLCLH

SEQ ID NO: 22620 - protein, 9 aa, BK virus
GRGRLCLHP

SEQ ID NO: 22621 - protein, 9 aa, BK virus
RGRLCLHPF

SEQ ID NO: 22622 - protein, 9 aa, BK virus
GRLCLHPFS

SEQ ID NO: 22623 - protein, 9 aa, BK virus
RLCLHPFSQ

SEQ ID NO: 22624 - protein, 9 aa, BK virus
LCLHPFSQV

SEQ ID NO: 22625 - protein, 9 aa, BK virus
CLHPFSQVV

SEQ ID NO: 22626 - protein, 9 aa, BK virus
LHPFSQVVR

SEQ ID NO: 22627 - protein, 9 aa, BK virus
HPFSQVVRV

SEQ ID NO: 22628 - protein, 9 aa, BK virus
PFSQVVRVW

SEQ ID NO: 22629 - protein, 9 aa, BK virus
FSQVVRVWR

SEQ ID NO: 22630 - protein, 9 aa, BK virus
SQVVRVWRL

SEQ ID NO: 22631 - protein, 9 aa, BK virus
QVVRVWRLF

SEQ ID NO: 22632 - protein, 9 aa, BK virus
VVRVWRLFL

SEQ ID NO: 22633 - protein, 9 aa, BK virus
VRVWRLFLR

SEQ ID NO: 22634 - protein, 9 aa, BK virus
RVWRLFLRP

SEQ ID NO: 22635 - protein, 9 aa, BK virus
VWRLFLRPS

SEQ ID NO: 22636 - protein, 9 aa, BK virus
WRLFLRPSK

SEQ ID NO: 22637 - protein, 9 aa, BK virus
RLFLRPSKT

SEQ ID NO: 22638 - protein, 9 aa, BK virus
LFLRPSKTI

SEQ ID NO: 22639 - protein, 9 aa, BK virus
FLRPSKTIW

SEQ ID NO: 22640 - protein, 9 aa, BK virus
LRPSKTIWG

SEQ ID NO: 22641 - protein, 9 aa, BK virus
RPSKTIWGN

SEQ ID NO: 22642 - protein, 9 aa, BK virus
PSKTIWGNP

SEQ ID NO: 22643 - protein, 9 aa, BK virus
SKTIWGNPY

SEQ ID NO: 22644 - protein, 9 aa, BK virus
KTIWGNPYS

SEQ ID NO: 22645 - protein, 9 aa, BK virus
TIWGNPYSF

SEQ ID NO: 22646 - protein, 9 aa, BK virus
IWGNPYSFA

SEQ ID NO: 22647 - protein, 9 aa, BK virus
WGNPYSFAI

SEQ ID NO: 22648 - protein, 9 aa, BK virus
GNPYSFAIF

SEQ ID NO: 22649 - protein, 9 aa, BK virus
NPYSFAIFA

SEQ ID NO: 22650 - protein, 9 aa, BK virus
PYSFAIFAK

SEQ ID NO: 22651 - protein, 10 aa, BK virus
QGRIHGAHGP

SEQ ID NO: 22652 - protein, 10 aa, BK virus
GRIHGAHGPF

SEQ ID NO: 22653 - protein, 10 aa, BK virus
RIHGAHGPFR

SEQ ID NO: 22654 - protein, 10 aa, BK virus
IHGAHGPFRP

SEQ ID NO: 22655 - protein, 10 aa, BK virus
KSCLGKSSLN

SEQ ID NO: 22656 - protein, 10 aa, BK virus
SCLGKSSLNE

SEQ ID NO: 22657 - protein, 10 aa, BK virus
CLGKSSLNEK

SEQ ID NO: 22658 - protein, 10 aa, BK virus
LGKSSLNEKS

SEQ ID NO: 22659 - protein, 10 aa, BK virus
GKSSLNEKSL

SEQ ID NO: 22660 - protein, 10 aa, BK virus
KSSLNEKSLF

SEQ ID NO: 22661 - protein, 10 aa, BK virus
SSLNEKSLFK

SEQ ID NO: 22662 - protein, 10 aa, BK virus
SLNEKSLFKE

SEQ ID NO: 22663 - protein, 10 aa, BK virus
LNEKSLFKEV

SEQ ID NO: 22664 - protein, 10 aa, BK virus
KNGAGCKGSS

SEQ ID NO: 22665 - protein, 10 aa, BK virus
NGAGCKGSSS

SEQ ID NO: 22666 - protein, 10 aa, BK virus
GAGCKGSSSA

SEQ ID NO: 22667 - protein, 10 aa, BK virus
FSSLPRYPVL

SEQ ID NO: 22668 - protein, 10 aa, BK virus
SSLPRYPVLQ

SEQ ID NO: 22669 - protein, 10 aa, BK virus
SLPRYPVLQG

SEQ ID NO: 22670 - protein, 10 aa, BK virus
LPRYPVLQGM

SEQ ID NO: 22671 - protein, 10 aa, BK virus
PRYPVLQGMA

SEQ ID NO: 22672 - protein, 10 aa, BK virus
RYPVLQGMAY

SEQ ID NO: 22673 - protein, 10 aa, BK virus
YPVLQGMAYL

SEQ ID NO: 22674 - protein, 10 aa, BK virus
PVLQGMAYLF

SEQ ID NO: 22675 - protein, 10 aa, BK virus
VLQGMAYLFQ

SEQ ID NO: 22676 - protein, 10 aa, BK virus
LQGMAYLFQK

SEQ ID NO: 22677 - protein, 10 aa, BK virus
QGMAYLFQKA

SEQ ID NO: 22678 - protein, 10 aa, BK virus
GMAYLFQKAF

SEQ ID NO: 22679 - protein, 10 aa, BK virus
MAYLFQKAFC

SEQ ID NO: 22680 - protein, 10 aa, BK virus
AYLFQKAFCA

SEQ ID NO: 22681 - protein, 10 aa, BK virus
YLFQKAFCAL

SEQ ID NO: 22682 - protein, 10 aa, BK virus
LFQKAFCALP

SEQ ID NO: 22683 - protein, 10 aa, BK virus
FQKAFCALPL

SEQ ID NO: 22684 - protein, 10 aa, BK virus
QKAFCALPLH

SEQ ID NO: 22685 - protein, 10 aa, BK virus
KAFCALPLHA

SEQ ID NO: 22686 - protein, 10 aa, BK virus
AFCALPLHAM

SEQ ID NO: 22687 - protein, 10 aa, BK virus
FCALPLHAMS

SEQ ID NO: 22688 - protein, 10 aa, BK virus
CALPLHAMSA

SEQ ID NO: 22689 - protein, 10 aa, BK virus
KIFKKRALGL

SEQ ID NO: 22690 - protein, 10 aa, BK virus
IFKKRALGLD

SEQ ID NO: 22691 - protein, 10 aa, BK virus
FKKRALGLDR

SEQ ID NO: 22692 - protein, 10 aa, BK virus
KKRALGLDRL

SEQ ID NO: 22693 - protein, 10 aa, BK virus
KRALGLDRLL

SEQ ID NO: 22694 - protein, 10 aa, BK virus
RALGLDRLLL

SEQ ID NO: 22695 - protein, 10 aa, BK virus
ALGLDRLLLH

SEQ ID NO: 22696 - protein, 10 aa, BK virus
LLHTVVWLRP

SEQ ID NO: 22697 - protein, 10 aa, BK virus
LHTVVWLRPN

SEQ ID NO: 22698 - protein, 10 aa, BK virus
RNSAMVGPNN

SEQ ID NO: 22699 - protein, 10 aa, BK virus
NSAMVGPNNW

SEQ ID NO: 22700 - protein, 10 aa, BK virus
SAMVGPNNWR

SEQ ID NO: 22701 - protein, 10 aa, BK virus
AMVGPNNWRN

SEQ ID NO: 22702 - protein, 10 aa, BK virus
MVGPNNWRNS

SEQ ID NO: 22703 - protein, 10 aa, BK virus
VGPNNWRNSL

SEQ ID NO: 22704 - protein, 10 aa, BK virus
GPNNWRNSLQ

SEQ ID NO: 22705 - protein, 10 aa, BK virus
PNNWRNSLQR

SEQ ID NO: 22706 - protein, 10 aa, BK virus
NNWRNSLQRS

SEQ ID NO: 22707 - protein, 10 aa, BK virus
NWRNSLQRSK

SEQ ID NO: 22708 - protein, 10 aa, BK virus
WRNSLQRSKA

SEQ ID NO: 22709 - protein, 10 aa, BK virus
RNSLQRSKAL

SEQ ID NO: 22710 - protein, 10 aa, BK virus
NSLQRSKALR

SEQ ID NO: 22711 - protein, 10 aa, BK virus
INNKILKGPK

SEQ ID NO: 22712 - protein, 10 aa, BK virus
VPTYGTEEWE

SEQ ID NO: 22713 - protein, 10 aa, BK virus
PTYGTEEWES

SEQ ID NO: 22714 - protein, 10 aa, BK virus
TYGTEEWESW

SEQ ID NO: 22715 - protein, 10 aa, BK virus
YGTEEWESWW

SEQ ID NO: 22716 - protein, 10 aa, BK virus
GTEEWESWWS

SEQ ID NO: 22717 - protein, 10 aa, BK virus
TEEWESWWSS

SEQ ID NO: 22718 - protein, 10 aa, BK virus
EEWESWWSSF

SEQ ID NO: 22719 - protein, 10 aa, BK virus
EWESWWSSFN

SEQ ID NO: 22720 - protein, 10 aa, BK virus
WESWWSSFNE

SEQ ID NO: 22721 - protein, 10 aa, BK virus
ESWWSSFNEK

SEQ ID NO: 22722 - protein, 10 aa, BK virus
SWWSSFNEKW

SEQ ID NO: 22723 - protein, 10 aa, BK virus
WWSSFNEKWD

SEQ ID NO: 22724 - protein, 10 aa, BK virus
WSSFNEKWDE

SEQ ID NO: 22725 - protein, 10 aa, BK virus
SSFNEKWDED

SEQ ID NO: 22726 - protein, 10 aa, BK virus
SFNEKWDEDL

SEQ ID NO: 22727 - protein, 10 aa, BK virus
FNEKWDEDLF

SEQ ID NO: 22728 - protein, 10 aa, BK virus
NEKWDEDLFC

SEQ ID NO: 22729 - protein, 10 aa, BK virus
EKWDEDLFCH

SEQ ID NO: 22730 - protein, 10 aa, BK virus
KWDEDLFCHE

SEQ ID NO: 22731 - protein, 10 aa, BK virus
WDEDLFCHED

SEQ ID NO: 22732 - protein, 10 aa, BK virus
DEDLFCHEDM

SEQ ID NO: 22733 - protein, 10 aa, BK virus
EDLFCHEDMF

SEQ ID NO: 22734 - protein, 10 aa, BK virus
DLFCHEDMFA

SEQ ID NO: 22735 - protein, 10 aa, BK virus
LFCHEDMFAS

SEQ ID NO: 22736 - protein, 10 aa, BK virus
FCHEDMFASD

SEQ ID NO: 22737 - protein, 10 aa, BK virus
CHEDMFASDE

SEQ ID NO: 22738 - protein, 10 aa, BK virus
HEDMFASDEE

SEQ ID NO: 22739 - protein, 10 aa, BK virus
EDMFASDEEA

SEQ ID NO: 22740 - protein, 10 aa, BK virus
DMFASDEEAT

SEQ ID NO: 22741 - protein, 10 aa, BK virus
MFASDEEATA

SEQ ID NO: 22742 - protein, 10 aa, BK virus
FASDEEATAD

SEQ ID NO: 22743 - protein, 10 aa, BK virus
ASDEEATADS

SEQ ID NO: 22744 - protein, 10 aa, BK virus
SDEEATADSQ

SEQ ID NO: 22745 - protein, 10 aa, BK virus
DEEATADSQH

SEQ ID NO: 22746 - protein, 10 aa, BK virus
EEATADSQHS

SEQ ID NO: 22747 - protein, 10 aa, BK virus
EATADSQHST

SEQ ID NO: 22748 - protein, 10 aa, BK virus
ATADSQHSTP

SEQ ID NO: 22749 - protein, 10 aa, BK virus
TADSQHSTPP

SEQ ID NO: 22750 - protein, 10 aa, BK virus
ADSQHSTPPK

SEQ ID NO: 22751 - protein, 10 aa, BK virus
DSQHSTPPKK

SEQ ID NO: 22752 - protein, 10 aa, BK virus
SQHSTPPKKK

SEQ ID NO: 22753 - protein, 10 aa, BK virus
QHSTPPKKKR

SEQ ID NO: 22754 - protein, 10 aa, BK virus
HSTPPKKKRK

SEQ ID NO: 22755 - protein, 10 aa, BK virus
STPPKKKRKV

SEQ ID NO: 22756 - protein, 10 aa, BK virus
TPPKKKRKVE

SEQ ID NO: 22757 - protein, 10 aa, BK virus
PPKKKRKVED

SEQ ID NO: 22758 - protein, 10 aa, BK virus
PKKKRKVEDP

SEQ ID NO: 22759 - protein, 10 aa, BK virus
KKKRKVEDPK

SEQ ID NO: 22760 - protein, 10 aa, BK virus
KKRKVEDPKD

SEQ ID NO: 22761 - protein, 10 aa, BK virus
KRKVEDPKDF

SEQ ID NO: 22762 - protein, 10 aa, BK virus
RKVEDPKDFP

SEQ ID NO: 22763 - protein, 10 aa, BK virus
KVEDPKDFPS

SEQ ID NO: 22764 - protein, 10 aa, BK virus
VEDPKDFPSD

SEQ ID NO: 22765 - protein, 10 aa, BK virus
EDPKDFPSDL

SEQ ID NO: 22766 - protein, 10 aa, BK virus
DPKDFPSDLH

SEQ ID NO: 22767 - protein, 10 aa, BK virus
PKDFPSDLHQ

SEQ ID NO: 22768 - protein, 10 aa, BK virus
KDFPSDLHQF

SEQ ID NO: 22769 - protein, 10 aa, BK virus
DFPSDLHQFL

SEQ ID NO: 22770 - protein, 10 aa, BK virus
FPSDLHQFLS

SEQ ID NO: 22771 - protein, 10 aa, BK virus
PSDLHQFLSQ

SEQ ID NO: 22772 - protein, 10 aa, BK virus
SDLHQFLSQA

SEQ ID NO: 22773 - protein, 10 aa, BK virus
DLHQFLSQAV

SEQ ID NO: 22774 - protein, 10 aa, BK virus
LHQFLSQAVF

SEQ ID NO: 22775 - protein, 10 aa, BK virus
HQFLSQAVFS

SEQ ID NO: 22776 - protein, 10 aa, BK virus
QFLSQAVFSN

SEQ ID NO: 22777 - protein, 10 aa, BK virus
FLSQAVFSNR

SEQ ID NO: 22778 - protein, 10 aa, BK virus
LSQAVFSNRT

SEQ ID NO: 22779 - protein, 10 aa, BK virus
SQAVFSNRTL

SEQ ID NO: 22780 - protein, 10 aa, BK virus
QAVFSNRTLA

SEQ ID NO: 22781 - protein, 10 aa, BK virus
AVFSNRTLAC

SEQ ID NO: 22782 - protein, 10 aa, BK virus
VFSNRTLACF

SEQ ID NO: 22783 - protein, 10 aa, BK virus
FSNRTLACFA

SEQ ID NO: 22784 - protein, 10 aa, BK virus
SNRTLACFAV

SEQ ID NO: 22785 - protein, 10 aa, BK virus
NRTLACFAVY

SEQ ID NO: 22786 - protein, 10 aa, BK virus
RTLACFAVYT

SEQ ID NO: 22787 - protein, 10 aa, BK virus
TLACFAVYTT

SEQ ID NO: 22788 - protein, 10 aa, BK virus
LACFAVYTTK

SEQ ID NO: 22789 - protein, 10 aa, BK virus
ACFAVYTTKE

SEQ ID NO: 22790 - protein, 10 aa, BK virus
CFAVYTTKEK

SEQ ID NO: 22791 - protein, 10 aa, BK virus
FAVYTTKEKA

SEQ ID NO: 22792 - protein, 10 aa, BK virus
AVYTTKEKAQ

SEQ ID NO: 22793 - protein, 10 aa, BK virus
VYTTKEKAQI

SEQ ID NO: 22794 - protein, 10 aa, BK virus
YTTKEKAQIL

SEQ ID NO: 22795 - protein, 10 aa, BK virus
TTKEKAQILY

SEQ ID NO: 22796 - protein, 10 aa, BK virus
TKEKAQILYK

SEQ ID NO: 22797 - protein, 10 aa, BK virus
KEKAQILYKK

SEQ ID NO: 22798 - protein, 10 aa, BK virus
EKAQILYKKL

SEQ ID NO: 22799 - protein, 10 aa, BK virus
KAQILYKKLM

SEQ ID NO: 22800 - protein, 10 aa, BK virus
AQILYKKLME

SEQ ID NO: 22801 - protein, 10 aa, BK virus
QILYKKLMEK

SEQ ID NO: 22802 - protein, 10 aa, BK virus
ILYKKLMEKY

SEQ ID NO: 22803 - protein, 10 aa, BK virus
LYKKLMEKYS

SEQ ID NO: 22804 - protein, 10 aa, BK virus
YKKLMEKYSV

SEQ ID NO: 22805 - protein, 10 aa, BK virus
KKLMEKYSVT

SEQ ID NO: 22806 - protein, 10 aa, BK virus
KLMEKYSVTF

SEQ ID NO: 22807 - protein, 10 aa, BK virus
LMEKYSVTFI

SEQ ID NO: 22808 - protein, 10 aa, BK virus
MEKYSVTFIS

SEQ ID NO: 22809 - protein, 10 aa, BK virus
EKYSVTFISR

SEQ ID NO: 22810 - protein, 10 aa, BK virus
KYSVTFISRH

SEQ ID NO: 22811 - protein, 10 aa, BK virus
YSVTFISRHM

SEQ ID NO: 22812 - protein, 10 aa, BK virus
SVTFISRHMC

SEQ ID NO: 22813 - protein, 10 aa, BK virus
VTFISRHMCA

SEQ ID NO: 22814 - protein, 10 aa, BK virus
TFISRHMCAG

SEQ ID NO: 22815 - protein, 10 aa, BK virus
FISRHMCAGH

SEQ ID NO: 22816 - protein, 10 aa, BK virus
ISRHMCAGHN

SEQ ID NO: 22817 - protein, 10 aa, BK virus
SRHMCAGHNI

SEQ ID NO: 22818 - protein, 10 aa, BK virus
RHMCAGHNII

SEQ ID NO: 22819 - protein, 10 aa, BK virus
HMCAGHNIIF

SEQ ID NO: 22820 - protein, 10 aa, BK virus
MCAGHNIIFF

SEQ ID NO: 22821 - protein, 10 aa, BK virus
CAGHNIIFFL

SEQ ID NO: 22822 - protein, 10 aa, BK virus
AGHNIIFFLT

SEQ ID NO: 22823 - protein, 10 aa, BK virus
GHNIIFFLTP

SEQ ID NO: 22824 - protein, 10 aa, BK virus
HNIIFFLTPH

SEQ ID NO: 22825 - protein, 10 aa, BK virus
NIIFFLTPHR

SEQ ID NO: 22826 - protein, 10 aa, BK virus
IIFFLTPHRH

SEQ ID NO: 22827 - protein, 10 aa, BK virus
IFFLTPHRHR

SEQ ID NO: 22828 - protein, 10 aa, BK virus
FFLTPHRHRV

SEQ ID NO: 22829 - protein, 10 aa, BK virus
FLTPHRHRVS

SEQ ID NO: 22830 - protein, 10 aa, BK virus
LTPHRHRVSA

SEQ ID NO: 22831 - protein, 10 aa, BK virus
TPHRHRVSAI

SEQ ID NO: 22832 - protein, 10 aa, BK virus
PHRHRVSAIN

SEQ ID NO: 22833 - protein, 10 aa, BK virus
HRHRVSAINN

SEQ ID NO: 22834 - protein, 10 aa, BK virus
RHRVSAINNF

SEQ ID NO: 22835 - protein, 10 aa, BK virus
HRVSAINNFC

SEQ ID NO: 22836 - protein, 10 aa, BK virus
RVSAINNFCQ

SEQ ID NO: 22837 - protein, 10 aa, BK virus
VSAINNFCQK

SEQ ID NO: 22838 - protein, 10 aa, BK virus
SAINNFCQKL

SEQ ID NO: 22839 - protein, 10 aa, BK virus
AINNFCQKLC

SEQ ID NO: 22840 - protein, 10 aa, BK virus
INNFCQKLCT

SEQ ID NO: 22841 - protein, 10 aa, BK virus
NNFCQKLCTF

SEQ ID NO: 22842 - protein, 10 aa, BK virus
NFCQKLCTFS

SEQ ID NO: 22843 - protein, 10 aa, BK virus
FCQKLCTFSF

SEQ ID NO: 22844 - protein, 10 aa, BK virus
CQKLCTFSFL

SEQ ID NO: 22845 - protein, 10 aa, BK virus
QKLCTFSFLI

SEQ ID NO: 22846 - protein, 10 aa, BK virus
KLCTFSFLIC

SEQ ID NO: 22847 - protein, 10 aa, BK virus
LCTFSFLICK

SEQ ID NO: 22848 - protein, 10 aa, BK virus
CTFSFLICKG

SEQ ID NO: 22849 - protein, 10 aa, BK virus
TFSFLICKGV

SEQ ID NO: 22850 - protein, 10 aa, BK virus
FSFLICKGVN

SEQ ID NO: 22851 - protein, 10 aa, BK virus
SFLICKGVNK

SEQ ID NO: 22852 - protein, 10 aa, BK virus
FLICKGVNKE

SEQ ID NO: 22853 - protein, 10 aa, BK virus
LICKGVNKEY

SEQ ID NO: 22854 - protein, 10 aa, BK virus
ICKGVNKEYL

SEQ ID NO: 22855 - protein, 10 aa, BK virus
CKGVNKEYLL

SEQ ID NO: 22856 - protein, 10 aa, BK virus
KGVNKEYLLY

SEQ ID NO: 22857 - protein, 10 aa, BK virus
GVNKEYLLYS

SEQ ID NO: 22858 - protein, 10 aa, BK virus
VNKEYLLYSA

SEQ ID NO: 22859 - protein, 10 aa, BK virus
NKEYLLYSAL

SEQ ID NO: 22860 - protein, 10 aa, BK virus
KEYLLYSALT

SEQ ID NO: 22861 - protein, 10 aa, BK virus
EYLLYSALTR

SEQ ID NO: 22862 - protein, 10 aa, BK virus
YLLYSALTRD

SEQ ID NO: 22863 - protein, 10 aa, BK virus
LLYSALTRDP

SEQ ID NO: 22864 - protein, 10 aa, BK virus
LYSALTRDPY

SEQ ID NO: 22865 - protein, 10 aa, BK virus
YSALTRDPYH

SEQ ID NO: 22866 - protein, 10 aa, BK virus
SALTRDPYHT

SEQ ID NO: 22867 - protein, 10 aa, BK virus
ALTRDPYHTI

SEQ ID NO: 22868 - protein, 10 aa, BK virus
LTRDPYHTIE

SEQ ID NO: 22869 - protein, 10 aa, BK virus
TRDPYHTIEE

SEQ ID NO: 22870 - protein, 10 aa, BK virus
RDPYHTIEES

SEQ ID NO: 22871 - protein, 10 aa, BK virus
DPYHTIEESI

SEQ ID NO: 22872 - protein, 10 aa, BK virus
PYHTIEESIQ

SEQ ID NO: 22873 - protein, 10 aa, BK virus
YHTIEESIQG

SEQ ID NO: 22874 - protein, 10 aa, BK virus
HTIEESIQGG

SEQ ID NO: 22875 - protein, 10 aa, BK virus
TIEESIQGGL

SEQ ID NO: 22876 - protein, 10 aa, BK virus
IEESIQGGLK

SEQ ID NO: 22877 - protein, 10 aa, BK virus
EESIQGGLKE

SEQ ID NO: 22878 - protein, 10 aa, BK virus
ESIQGGLKEH

SEQ ID NO: 22879 - protein, 10 aa, BK virus
SIQGGLKEHD

SEQ ID NO: 22880 - protein, 10 aa, BK virus
IQGGLKEHDF

SEQ ID NO: 22881 - protein, 10 aa, BK virus
QGGLKEHDFS

SEQ ID NO: 22882 - protein, 10 aa, BK virus
GGLKEHDFSP

SEQ ID NO: 22883 - protein, 10 aa, BK virus
GLKEHDFSPE

SEQ ID NO: 22884 - protein, 10 aa, BK virus
LKEHDFSPEE

SEQ ID NO: 22885 - protein, 10 aa, BK virus
KEHDFSPEEP

SEQ ID NO: 22886 - protein, 10 aa, BK virus
EHDFSPEEPE

SEQ ID NO: 22887 - protein, 10 aa, BK virus
HDFSPEEPEE

SEQ ID NO: 22888 - protein, 10 aa, BK virus
DFSPEEPEET

SEQ ID NO: 22889 - protein, 10 aa, BK virus
FSPEEPEETK

SEQ ID NO: 22890 - protein, 10 aa, BK virus
SPEEPEETKQ

SEQ ID NO: 22891 - protein, 10 aa, BK virus
PEEPEETKQV

SEQ ID NO: 22892 - protein, 10 aa, BK virus
EEPEETKQVS

SEQ ID NO: 22893 - protein, 10 aa, BK virus
EPEETKQVSW

SEQ ID NO: 22894 - protein, 10 aa, BK virus
PEETKQVSWK

SEQ ID NO: 22895 - protein, 10 aa, BK virus
EETKQVSWKL

SEQ ID NO: 22896 - protein, 10 aa, BK virus
ETKQVSWKLI

SEQ ID NO: 22897 - protein, 10 aa, BK virus
TKQVSWKLIT

SEQ ID NO: 22898 - protein, 10 aa, BK virus
KQVSWKLITE

SEQ ID NO: 22899 - protein, 10 aa, BK virus
QVSWKLITEY

SEQ ID NO: 22900 - protein, 10 aa, BK virus
VSWKLITEYA

SEQ ID NO: 22901 - protein, 10 aa, BK virus
SWKLITEYAV

SEQ ID NO: 22902 - protein, 10 aa, BK virus
WKLITEYAVE

SEQ ID NO: 22903 - protein, 10 aa, BK virus
KLITEYAVET

SEQ ID NO: 22904 - protein, 10 aa, BK virus
LITEYAVETK

SEQ ID NO: 22905 - protein, 10 aa, BK virus
ITEYAVETKC

SEQ ID NO: 22906 - protein, 10 aa, BK virus
TEYAVETKCE

SEQ ID NO: 22907 - protein, 10 aa, BK virus
EYAVETKCED

SEQ ID NO: 22908 - protein, 10 aa, BK virus
YAVETKCEDV

SEQ ID NO: 22909 - protein, 10 aa, BK virus
AVETKCEDVF

SEQ ID NO: 22910 - protein, 10 aa, BK virus
VETKCEDVFL

SEQ ID NO: 22911 - protein, 10 aa, BK virus
ETKCEDVFLL

SEQ ID NO: 22912 - protein, 10 aa, BK virus
TKCEDVFLLL

SEQ ID NO: 22913 - protein, 10 aa, BK virus
KCEDVFLLLG

SEQ ID NO: 22914 - protein, 10 aa, BK virus
CEDVFLLLGM

SEQ ID NO: 22915 - protein, 10 aa, BK virus
EDVFLLLGMY

SEQ ID NO: 22916 - protein, 10 aa, BK virus
DVFLLLGMYL

SEQ ID NO: 22917 - protein, 10 aa, BK virus
VFLLLGMYLE

SEQ ID NO: 22918 - protein, 10 aa, BK virus
FLLLGMYLEF

SEQ ID NO: 22919 - protein, 10 aa, BK virus
LLLGMYLEFQ

SEQ ID NO: 22920 - protein, 10 aa, BK virus
LLGMYLEFQY

SEQ ID NO: 22921 - protein, 10 aa, BK virus
LGMYLEFQYN

SEQ ID NO: 22922 - protein, 10 aa, BK virus
GMYLEFQYNV

SEQ ID NO: 22923 - protein, 10 aa, BK virus
MYLEFQYNVE

SEQ ID NO: 22924 - protein, 10 aa, BK virus
YLEFQYNVEE

SEQ ID NO: 22925 - protein, 10 aa, BK virus
LEFQYNVEEC

SEQ ID NO: 22926 - protein, 10 aa, BK virus
EFQYNVEECK

SEQ ID NO: 22927 - protein, 10 aa, BK virus
FQYNVEECKK

SEQ ID NO: 22928 - protein, 10 aa, BK virus
QYNVEECKKC

SEQ ID NO: 22929 - protein, 10 aa, BK virus
YNVEECKKCQ

SEQ ID NO: 22930 - protein, 10 aa, BK virus
NVEECKKCQK

SEQ ID NO: 22931 - protein, 10 aa, BK virus
VEECKKCQKK

SEQ ID NO: 22932 - protein, 10 aa, BK virus
EECKKCQKKD

SEQ ID NO: 22933 - protein, 10 aa, BK virus
ECKKCQKKDQ

SEQ ID NO: 22934 - protein, 10 aa, BK virus
CKKCQKKDQP

SEQ ID NO: 22935 - protein, 10 aa, BK virus
KKCQKKDQPY

SEQ ID NO: 22936 - protein, 10 aa, BK virus
KCQKKDQPYH

SEQ ID NO: 22937 - protein, 10 aa, BK virus
CQKKDQPYHF

SEQ ID NO: 22938 - protein, 10 aa, BK virus
QKKDQPYHFK

SEQ ID NO: 22939 - protein, 10 aa, BK virus
KKDQPYHFKY

SEQ ID NO: 22940 - protein, 10 aa, BK virus
KDQPYHFKYH

SEQ ID NO: 22941 - protein, 10 aa, BK virus
DQPYHFKYHE

SEQ ID NO: 22942 - protein, 10 aa, BK virus
QPYHFKYHEK

SEQ ID NO: 22943 - protein, 10 aa, BK virus
PYHFKYHEKH

SEQ ID NO: 22944 - protein, 10 aa, BK virus
YHFKYHEKHF

SEQ ID NO: 22945 - protein, 10 aa, BK virus
HFKYHEKHFA

SEQ ID NO: 22946 - protein, 10 aa, BK virus
FKYHEKHFAN

SEQ ID NO: 22947 - protein, 10 aa, BK virus
KYHEKHFANA

SEQ ID NO: 22948 - protein, 10 aa, BK virus
YHEKHFANAI

SEQ ID NO: 22949 - protein, 10 aa, BK virus
HEKHFANAII

SEQ ID NO: 22950 - protein, 10 aa, BK virus
EKHFANAIIF

SEQ ID NO: 22951 - protein, 10 aa, BK virus
KHFANAIIFA

SEQ ID NO: 22952 - protein, 10 aa, BK virus
HFANAIIFAE

SEQ ID NO: 22953 - protein, 10 aa, BK virus
FANAIIFAES

SEQ ID NO: 22954 - protein, 10 aa, BK virus
ANAIIFAESK

SEQ ID NO: 22955 - protein, 10 aa, BK virus
NAIIFAESKN

SEQ ID NO: 22956 - protein, 10 aa, BK virus
AIIFAESKNQ

SEQ ID NO: 22957 - protein, 10 aa, BK virus
IIFAESKNQK

SEQ ID NO: 22958 - protein, 10 aa, BK virus
IFAESKNQKS

SEQ ID NO: 22959 - protein, 10 aa, BK virus
FAESKNQKSI

SEQ ID NO: 22960 - protein, 10 aa, BK virus
AESKNQKSIC

SEQ ID NO: 22961 - protein, 10 aa, BK virus
ESKNQKSICQ

SEQ ID NO: 22962 - protein, 10 aa, BK virus
SKNQKSICQQ

SEQ ID NO: 22963 - protein, 10 aa, BK virus
KNQKSICQQA

SEQ ID NO: 22964 - protein, 10 aa, BK virus
NQKSICQQAV

SEQ ID NO: 22965 - protein, 10 aa, BK virus
QKSICQQAVD

SEQ ID NO: 22966 - protein, 10 aa, BK virus
KSICQQAVDT

SEQ ID NO: 22967 - protein, 10 aa, BK virus
SICQQAVDTV

SEQ ID NO: 22968 - protein, 10 aa, BK virus
ICQQAVDTVL

SEQ ID NO: 22969 - protein, 10 aa, BK virus
CQQAVDTVLA

SEQ ID NO: 22970 - protein, 10 aa, BK virus
QQAVDTVLAK

SEQ ID NO: 22971 - protein, 10 aa, BK virus
QAVDTVLAKK

SEQ ID NO: 22972 - protein, 10 aa, BK virus
AVDTVLAKKR

SEQ ID NO: 22973 - protein, 10 aa, BK virus
VDTVLAKKRV

SEQ ID NO: 22974 - protein, 10 aa, BK virus
DTVLAKKRVD

SEQ ID NO: 22975 - protein, 10 aa, BK virus
TVLAKKRVDT

SEQ ID NO: 22976 - protein, 10 aa, BK virus
VLAKKRVDTL

SEQ ID NO: 22977 - protein, 10 aa, BK virus
LAKKRVDTLH

SEQ ID NO: 22978 - protein, 10 aa, BK virus
AKKRVDTLHM

SEQ ID NO: 22979 - protein, 10 aa, BK virus
KKRVDTLHMT

SEQ ID NO: 22980 - protein, 10 aa, BK virus
KRVDTLHMTR

SEQ ID NO: 22981 - protein, 10 aa, BK virus
RVDTLHMTRE

SEQ ID NO: 22982 - protein, 10 aa, BK virus
VDTLHMTREE

SEQ ID NO: 22983 - protein, 10 aa, BK virus
DTLHMTREEM

SEQ ID NO: 22984 - protein, 10 aa, BK virus
TLHMTREEML

SEQ ID NO: 22985 - protein, 10 aa, BK virus
LHMTREEMLT

SEQ ID NO: 22986 - protein, 10 aa, BK virus
HMTREEMLTE

SEQ ID NO: 22987 - protein, 10 aa, BK virus
MTREEMLTER

SEQ ID NO: 22988 - protein, 10 aa, BK virus
TREEMLTERF

SEQ ID NO: 22989 - protein, 10 aa, BK virus
REEMLTERFN

SEQ ID NO: 22990 - protein, 10 aa, BK virus
EEMLTERFNH

SEQ ID NO: 22991 - protein, 10 aa, BK virus
EMLTERFNHI

SEQ ID NO: 22992 - protein, 10 aa, BK virus
MLTERFNHIL

SEQ ID NO: 22993 - protein, 10 aa, BK virus
LTERFNHILD

SEQ ID NO: 22994 - protein, 10 aa, BK virus
TERFNHILDK

SEQ ID NO: 22995 - protein, 10 aa, BK virus
ERFNHILDKM

SEQ ID NO: 22996 - protein, 10 aa, BK virus
RFNHILDKMD

SEQ ID NO: 22997 - protein, 10 aa, BK virus
FNHILDKMDL

SEQ ID NO: 22998 - protein, 10 aa, BK virus
NHILDKMDLI

SEQ ID NO: 22999 - protein, 10 aa, BK virus
HILDKMDLIF

SEQ ID NO: 23000 - protein, 10 aa, BK virus
ILDKMDLIFG

SEQ ID NO: 23001 - protein, 10 aa, BK virus
LDKMDLIFGA

SEQ ID NO: 23002 - protein, 10 aa, BK virus
DKMDLIFGAH

SEQ ID NO: 23003 - protein, 10 aa, BK virus
KMDLIFGAHG

SEQ ID NO: 23004 - protein, 10 aa, BK virus
MDLIFGAHGN

SEQ ID NO: 23005 - protein, 10 aa, BK virus
DLIFGAHGNA

SEQ ID NO: 23006 - protein, 10 aa, BK virus
LIFGAHGNAV

SEQ ID NO: 23007 - protein, 10 aa, BK virus
IFGAHGNAVL

SEQ ID NO: 23008 - protein, 10 aa, BK virus
FGAHGNAVLE

SEQ ID NO: 23009 - protein, 10 aa, BK virus
GAHGNAVLEQ

SEQ ID NO: 23010 - protein, 10 aa, BK virus
AHGNAVLEQY

SEQ ID NO: 23011 - protein, 10 aa, BK virus
HGNAVLEQYM

SEQ ID NO: 23012 - protein, 10 aa, BK virus
GNAVLEQYMA

SEQ ID NO: 23013 - protein, 10 aa, BK virus
NAVLEQYMAG

SEQ ID NO: 23014 - protein, 10 aa, BK virus
AVLEQYMAGV

SEQ ID NO: 23015 - protein, 10 aa, BK virus
VLEQYMAGVA

SEQ ID NO: 23016 - protein, 10 aa, BK virus
LEQYMAGVAW

SEQ ID NO: 23017 - protein, 10 aa, BK virus
EQYMAGVAWL

SEQ ID NO: 23018 - protein, 10 aa, BK virus
QYMAGVAWLH

SEQ ID NO: 23019 - protein, 10 aa, BK virus
YMAGVAWLHC

SEQ ID NO: 23020 - protein, 10 aa, BK virus
MAGVAWLHCL

SEQ ID NO: 23021 - protein, 10 aa, BK virus
AGVAWLHCLL

SEQ ID NO: 23022 - protein, 10 aa, BK virus
GVAWLHCLLP

SEQ ID NO: 23023 - protein, 10 aa, BK virus
VAWLHCLLPK

SEQ ID NO: 23024 - protein, 10 aa, BK virus
AWLHCLLPKM

SEQ ID NO: 23025 - protein, 10 aa, BK virus
WLHCLLPKMD

SEQ ID NO: 23026 - protein, 10 aa, BK virus
LHCLLPKMDS

SEQ ID NO: 23027 - protein, 10 aa, BK virus
HCLLPKMDSV

SEQ ID NO: 23028 - protein, 10 aa, BK virus
CLLPKMDSVI

SEQ ID NO: 23029 - protein, 10 aa, BK virus
LLPKMDSVIF

SEQ ID NO: 23030 - protein, 10 aa, BK virus
LPKMDSVIFD

SEQ ID NO: 23031 - protein, 10 aa, BK virus
PKMDSVIFDF

SEQ ID NO: 23032 - protein, 10 aa, BK virus
KMDSVIFDFL

SEQ ID NO: 23033 - protein, 10 aa, BK virus
MDSVIFDFLH

SEQ ID NO: 23034 - protein, 10 aa, BK virus
DSVIFDFLHC

SEQ ID NO: 23035 - protein, 10 aa, BK virus
SVIFDFLHCI

SEQ ID NO: 23036 - protein, 10 aa, BK virus
VIFDFLHCIV

SEQ ID NO: 23037 - protein, 10 aa, BK virus
IFDFLHCIVF

SEQ ID NO: 23038 - protein, 10 aa, BK virus
FDFLHCIVFN

SEQ ID NO: 23039 - protein, 10 aa, BK virus
DFLHCIVFNV

SEQ ID NO: 23040 - protein, 10 aa, BK virus
FLHCIVFNVP

SEQ ID NO: 23041 - protein, 10 aa, BK virus
LHCIVFNVPK

SEQ ID NO: 23042 - protein, 10 aa, BK virus
HCIVFNVPKR

SEQ ID NO: 23043 - protein, 10 aa, BK virus
CIVFNVPKRR

SEQ ID NO: 23044 - protein, 10 aa, BK virus
IVFNVPKRRY

SEQ ID NO: 23045 - protein, 10 aa, BK virus
VFNVPKRRYW

SEQ ID NO: 23046 - protein, 10 aa, BK virus
FNVPKRRYWL

SEQ ID NO: 23047 - protein, 10 aa, BK virus
NVPKRRYWLF

SEQ ID NO: 23048 - protein, 10 aa, BK virus
VPKRRYWLFK

SEQ ID NO: 23049 - protein, 10 aa, BK virus
PKRRYWLFKG

SEQ ID NO: 23050 - protein, 10 aa, BK virus
KRRYWLFKGP

SEQ ID NO: 23051 - protein, 10 aa, BK virus
RRYWLFKGPI

SEQ ID NO: 23052 - protein, 10 aa, BK virus
RYWLFKGPID

SEQ ID NO: 23053 - protein, 10 aa, BK virus
YWLFKGPIDS

SEQ ID NO: 23054 - protein, 10 aa, BK virus
WLFKGPIDSG

SEQ ID NO: 23055 - protein, 10 aa, BK virus
LFKGPIDSGK

SEQ ID NO: 23056 - protein, 10 aa, BK virus
FKGPIDSGKT

SEQ ID NO: 23057 - protein, 10 aa, BK virus
KGPIDSGKTT

SEQ ID NO: 23058 - protein, 10 aa, BK virus
GPIDSGKTTL

SEQ ID NO: 23059 - protein, 10 aa, BK virus
PIDSGKTTLA

SEQ ID NO: 23060 - protein, 10 aa, BK virus
IDSGKTTLAA

SEQ ID NO: 23061 - protein, 10 aa, BK virus
DSGKTTLAAG

SEQ ID NO: 23062 - protein, 10 aa, BK virus
SGKTTLAAGL

SEQ ID NO: 23063 - protein, 10 aa, BK virus
GKTTLAAGLL

SEQ ID NO: 23064 - protein, 10 aa, BK virus
KTTLAAGLLD

SEQ ID NO: 23065 - protein, 10 aa, BK virus
TTLAAGLLDL

SEQ ID NO: 23066 - protein, 10 aa, BK virus
TLAAGLLDLC

SEQ ID NO: 23067 - protein, 10 aa, BK virus
LAAGLLDLCG

SEQ ID NO: 23068 - protein, 10 aa, BK virus
AAGLLDLCGG

SEQ ID NO: 23069 - protein, 10 aa, BK virus
AGLLDLCGGK

SEQ ID NO: 23070 - protein, 10 aa, BK virus
GLLDLCGGKA

SEQ ID NO: 23071 - protein, 10 aa, BK virus
LLDLCGGKAL

SEQ ID NO: 23072 - protein, 10 aa, BK virus
LDLCGGKALN

SEQ ID NO: 23073 - protein, 10 aa, BK virus
DLCGGKALNV

SEQ ID NO: 23074 - protein, 10 aa, BK virus
LCGGKALNVN

SEQ ID NO: 23075 - protein, 10 aa, BK virus
CGGKALNVNL

SEQ ID NO: 23076 - protein, 10 aa, BK virus
GGKALNVNLP

SEQ ID NO: 23077 - protein, 10 aa, BK virus
GKALNVNLPM

SEQ ID NO: 23078 - protein, 10 aa, BK virus
KALNVNLPME

SEQ ID NO: 23079 - protein, 10 aa, BK virus
ALNVNLPMER

SEQ ID NO: 23080 - protein, 10 aa, BK virus
LNVNLPMERL

SEQ ID NO: 23081 - protein, 10 aa, BK virus
NVNLPMERLT

SEQ ID NO: 23082 - protein, 10 aa, BK virus
VNLPMERLTF

SEQ ID NO: 23083 - protein, 10 aa, BK virus
NLPMERLTFE

SEQ ID NO: 23084 - protein, 10 aa, BK virus
LPMERLTFEL

SEQ ID NO: 23085 - protein, 10 aa, BK virus
PMERLTFELG

SEQ ID NO: 23086 - protein, 10 aa, BK virus
MERLTFELGV

SEQ ID NO: 23087 - protein, 10 aa, BK virus
ERLTFELGVA

SEQ ID NO: 23088 - protein, 10 aa, BK virus
RLTFELGVAI

SEQ ID NO: 23089 - protein, 10 aa, BK virus
LTFELGVAID

SEQ ID NO: 23090 - protein, 10 aa, BK virus
TFELGVAIDQ

SEQ ID NO: 23091 - protein, 10 aa, BK virus
FELGVAIDQY

SEQ ID NO: 23092 - protein, 10 aa, BK virus
ELGVAIDQYM

SEQ ID NO: 23093 - protein, 10 aa, BK virus
LGVAIDQYMV

SEQ ID NO: 23094 - protein, 10 aa, BK virus
GVAIDQYMVV

SEQ ID NO: 23095 - protein, 10 aa, BK virus
VAIDQYMVVF

SEQ ID NO: 23096 - protein, 10 aa, BK virus
AIDQYMVVFE

SEQ ID NO: 23097 - protein, 10 aa, BK virus
IDQYMVVFED

SEQ ID NO: 23098 - protein, 10 aa, BK virus
DQYMVVFEDV

SEQ ID NO: 23099 - protein, 10 aa, BK virus
QYMVVFEDVK

SEQ ID NO: 23100 - protein, 10 aa, BK virus
YMVVFEDVKG

SEQ ID NO: 23101 - protein, 10 aa, BK virus
MVVFEDVKGT

SEQ ID NO: 23102 - protein, 10 aa, BK virus
VVFEDVKGTG

SEQ ID NO: 23103 - protein, 10 aa, BK virus
VFEDVKGTGA

SEQ ID NO: 23104 - protein, 10 aa, BK virus
FEDVKGTGAE

SEQ ID NO: 23105 - protein, 10 aa, BK virus
EDVKGTGAES

SEQ ID NO: 23106 - protein, 10 aa, BK virus
DVKGTGAESK

SEQ ID NO: 23107 - protein, 10 aa, BK virus
VKGTGAESKD

SEQ ID NO: 23108 - protein, 10 aa, BK virus
KGTGAESKDL

SEQ ID NO: 23109 - protein, 10 aa, BK virus
GTGAESKDLP

SEQ ID NO: 23110 - protein, 10 aa, BK virus
TGAESKDLPS

SEQ ID NO: 23111 - protein, 10 aa, BK virus
GAESKDLPSG

SEQ ID NO: 23112 - protein, 10 aa, BK virus
AESKDLPSGH

SEQ ID NO: 23113 - protein, 10 aa, BK virus
ESKDLPSGHG

SEQ ID NO: 23114 - protein, 10 aa, BK virus
SKDLPSGHGI

SEQ ID NO: 23115 - protein, 10 aa, BK virus
KDLPSGHGIN

SEQ ID NO: 23116 - protein, 10 aa, BK virus
DLPSGHGINN

SEQ ID NO: 23117 - protein, 10 aa, BK virus
LPSGHGINNL

SEQ ID NO: 23118 - protein, 10 aa, BK virus
PSGHGINNLD

SEQ ID NO: 23119 - protein, 10 aa, BK virus
SGHGINNLDS

SEQ ID NO: 23120 - protein, 10 aa, BK virus
GHGINNLDSL

SEQ ID NO: 23121 - protein, 10 aa, BK virus
HGINNLDSLR

SEQ ID NO: 23122 - protein, 10 aa, BK virus
GINNLDSLRD

SEQ ID NO: 23123 - protein, 10 aa, BK virus
INNLDSLRDY

SEQ ID NO: 23124 - protein, 10 aa, BK virus
NNLDSLRDYL

SEQ ID NO: 23125 - protein, 10 aa, BK virus
NLDSLRDYLD

SEQ ID NO: 23126 - protein, 10 aa, BK virus
LDSLRDYLDG

SEQ ID NO: 23127 - protein, 10 aa, BK virus
DSLRDYLDGS

SEQ ID NO: 23128 - protein, 10 aa, BK virus
SLRDYLDGSV

SEQ ID NO: 23129 - protein, 10 aa, BK virus
LRDYLDGSVK

SEQ ID NO: 23130 - protein, 10 aa, BK virus
RDYLDGSVKV

SEQ ID NO: 23131 - protein, 10 aa, BK virus
DYLDGSVKVN

SEQ ID NO: 23132 - protein, 10 aa, BK virus
YLDGSVKVNL

SEQ ID NO: 23133 - protein, 10 aa, BK virus
LDGSVKVNLE

SEQ ID NO: 23134 - protein, 10 aa, BK virus
DGSVKVNLEK

SEQ ID NO: 23135 - protein, 10 aa, BK virus
GSVKVNLEKK

SEQ ID NO: 23136 - protein, 10 aa, BK virus
SVKVNLEKKH

SEQ ID NO: 23137 - protein, 10 aa, BK virus
VKVNLEKKHL

SEQ ID NO: 23138 - protein, 10 aa, BK virus
KVNLEKKHLN

SEQ ID NO: 23139 - protein, 10 aa, BK virus
VNLEKKHLNK

SEQ ID NO: 23140 - protein, 10 aa, BK virus
NLEKKHLNKR

SEQ ID NO: 23141 - protein, 10 aa, BK virus
LEKKHLNKRT

SEQ ID NO: 23142 - protein, 10 aa, BK virus
EKKHLNKRTQ

SEQ ID NO: 23143 - protein, 10 aa, BK virus
KKHLNKRTQI

SEQ ID NO: 23144 - protein, 10 aa, BK virus
KHLNKRTQIF

SEQ ID NO: 23145 - protein, 10 aa, BK virus
HLNKRTQIFP

SEQ ID NO: 23146 - protein, 10 aa, BK virus
LNKRTQIFPP

SEQ ID NO: 23147 - protein, 10 aa, BK virus
NKRTQIFPPG

SEQ ID NO: 23148 - protein, 10 aa, BK virus
KRTQIFPPGL

SEQ ID NO: 23149 - protein, 10 aa, BK virus
RTQIFPPGLV

SEQ ID NO: 23150 - protein, 10 aa, BK virus
TQIFPPGLVT

SEQ ID NO: 23151 - protein, 10 aa, BK virus
QIFPPGLVTM

SEQ ID NO: 23152 - protein, 10 aa, BK virus
IFPPGLVTMN

SEQ ID NO: 23153 - protein, 10 aa, BK virus
FPPGLVTMNE

SEQ ID NO: 23154 - protein, 10 aa, BK virus
PPGLVTMNEY

SEQ ID NO: 23155 - protein, 10 aa, BK virus
PGLVTMNEYP

SEQ ID NO: 23156 - protein, 10 aa, BK virus
GLVTMNEYPV

SEQ ID NO: 23157 - protein, 10 aa, BK virus
LVTMNEYPVP

SEQ ID NO: 23158 - protein, 10 aa, BK virus
VTMNEYPVPK

SEQ ID NO: 23159 - protein, 10 aa, BK virus
TMNEYPVPKT

SEQ ID NO: 23160 - protein, 10 aa, BK virus
MNEYPVPKTL

SEQ ID NO: 23161 - protein, 10 aa, BK virus
NEYPVPKTLQ

SEQ ID NO: 23162 - protein, 10 aa, BK virus
EYPVPKTLQA

SEQ ID NO: 23163 - protein, 10 aa, BK virus
YPVPKTLQAR

SEQ ID NO: 23164 - protein, 10 aa, BK virus
PVPKTLQARF

SEQ ID NO: 23165 - protein, 10 aa, BK virus
VPKTLQARFV

SEQ ID NO: 23166 - protein, 10 aa, BK virus
PKTLQARFVR

SEQ ID NO: 23167 - protein, 10 aa, BK virus
KTLQARFVRQ

SEQ ID NO: 23168 - protein, 10 aa, BK virus
TLQARFVRQI

SEQ ID NO: 23169 - protein, 10 aa, BK virus
LQARFVRQID

SEQ ID NO: 23170 - protein, 10 aa, BK virus
QARFVRQIDF

SEQ ID NO: 23171 - protein, 10 aa, BK virus
ARFVRQIDFR

SEQ ID NO: 23172 - protein, 10 aa, BK virus
RFVRQIDFRP

SEQ ID NO: 23173 - protein, 10 aa, BK virus
FVRQIDFRPK

SEQ ID NO: 23174 - protein, 10 aa, BK virus
VRQIDFRPKI

SEQ ID NO: 23175 - protein, 10 aa, BK virus
RQIDFRPKIY

SEQ ID NO: 23176 - protein, 10 aa, BK virus
QIDFRPKIYL

SEQ ID NO: 23177 - protein, 10 aa, BK virus
IDFRPKIYLR

SEQ ID NO: 23178 - protein, 10 aa, BK virus
DFRPKIYLRK

SEQ ID NO: 23179 - protein, 10 aa, BK virus
FRPKIYLRKS

SEQ ID NO: 23180 - protein, 10 aa, BK virus
RPKIYLRKSL

SEQ ID NO: 23181 - protein, 10 aa, BK virus
PKIYLRKSLQ

SEQ ID NO: 23182 - protein, 10 aa, BK virus
KIYLRKSLQN

SEQ ID NO: 23183 - protein, 10 aa, BK virus
IYLRKSLQNS

SEQ ID NO: 23184 - protein, 10 aa, BK virus
YLRKSLQNSE

SEQ ID NO: 23185 - protein, 10 aa, BK virus
LRKSLQNSEF

SEQ ID NO: 23186 - protein, 10 aa, BK virus
RKSLQNSEFL

SEQ ID NO: 23187 - protein, 10 aa, BK virus
KSLQNSEFLL

SEQ ID NO: 23188 - protein, 10 aa, BK virus
SLQNSEFLLE

SEQ ID NO: 23189 - protein, 10 aa, BK virus
LQNSEFLLEK

SEQ ID NO: 23190 - protein, 10 aa, BK virus
QNSEFLLEKR

SEQ ID NO: 23191 - protein, 10 aa, BK virus
NSEFLLEKRI

SEQ ID NO: 23192 - protein, 10 aa, BK virus
SEFLLEKRIL

SEQ ID NO: 23193 - protein, 10 aa, BK virus
EFLLEKRILQ

SEQ ID NO: 23194 - protein, 10 aa, BK virus
FLLEKRILQS

SEQ ID NO: 23195 - protein, 10 aa, BK virus
LLEKRILQSG

SEQ ID NO: 23196 - protein, 10 aa, BK virus
LEKRILQSGM

SEQ ID NO: 23197 - protein, 10 aa, BK virus
EKRILQSGMT

SEQ ID NO: 23198 - protein, 10 aa, BK virus
KRILQSGMTL

SEQ ID NO: 23199 - protein, 10 aa, BK virus
RILQSGMTLL

SEQ ID NO: 23200 - protein, 10 aa, BK virus
ILQSGMTLLL

SEQ ID NO: 23201 - protein, 10 aa, BK virus
LQSGMTLLLL

SEQ ID NO: 23202 - protein, 10 aa, BK virus
QSGMTLLLLL

SEQ ID NO: 23203 - protein, 10 aa, BK virus
SGMTLLLLLI

SEQ ID NO: 23204 - protein, 10 aa, BK virus
GMTLLLLLIW

SEQ ID NO: 23205 - protein, 10 aa, BK virus
MTLLLLLIWF

SEQ ID NO: 23206 - protein, 10 aa, BK virus
TLLLLLIWFR

SEQ ID NO: 23207 - protein, 10 aa, BK virus
LLLLLIWFRP

SEQ ID NO: 23208 - protein, 10 aa, BK virus
LLLLIWFRPV

SEQ ID NO: 23209 - protein, 10 aa, BK virus
LLLIWFRPVA

SEQ ID NO: 23210 - protein, 10 aa, BK virus
LLIWFRPVAD

SEQ ID NO: 23211 - protein, 10 aa, BK virus
LIWFRPVADF

SEQ ID NO: 23212 - protein, 10 aa, BK virus
IWFRPVADFA

SEQ ID NO: 23213 - protein, 10 aa, BK virus
WFRPVADFAT

SEQ ID NO: 23214 - protein, 10 aa, BK virus
FRPVADFATD

SEQ ID NO: 23215 - protein, 10 aa, BK virus
RPVADFATDI

SEQ ID NO: 23216 - protein, 10 aa, BK virus
PVADFATDIQ

SEQ ID NO: 23217 - protein, 10 aa, BK virus
VADFATDIQS

SEQ ID NO: 23218 - protein, 10 aa, BK virus
ADFATDIQSR

SEQ ID NO: 23219 - protein, 10 aa, BK virus
DFATDIQSRI

SEQ ID NO: 23220 - protein, 10 aa, BK virus
FATDIQSRIV

SEQ ID NO: 23221 - protein, 10 aa, BK virus
ATDIQSRIVE

SEQ ID NO: 23222 - protein, 10 aa, BK virus
TDIQSRIVEW

SEQ ID NO: 23223 - protein, 10 aa, BK virus
DIQSRIVEWK

SEQ ID NO: 23224 - protein, 10 aa, BK virus
IQSRIVEWKE

SEQ ID NO: 23225 - protein, 10 aa, BK virus
QSRIVEWKER

SEQ ID NO: 23226 - protein, 10 aa, BK virus
SRIVEWKERL

SEQ ID NO: 23227 - protein, 10 aa, BK virus
RIVEWKERLD

SEQ ID NO: 23228 - protein, 10 aa, BK virus
IVEWKERLDS

SEQ ID NO: 23229 - protein, 10 aa, BK virus
VEWKERLDSE

SEQ ID NO: 23230 - protein, 10 aa, BK virus
EWKERLDSEI

SEQ ID NO: 23231 - protein, 10 aa, BK virus
WKERLDSEIS

SEQ ID NO: 23232 - protein, 10 aa, BK virus
KERLDSEISM

SEQ ID NO: 23233 - protein, 10 aa, BK virus
ERLDSEISMY

SEQ ID NO: 23234 - protein, 10 aa, BK virus
RLDSEISMYT

SEQ ID NO: 23235 - protein, 10 aa, BK virus
LDSEISMYTF

SEQ ID NO: 23236 - protein, 10 aa, BK virus
DSEISMYTFS

SEQ ID NO: 23237 - protein, 10 aa, BK virus
SEISMYTFSR

SEQ ID NO: 23238 - protein, 10 aa, BK virus
EISMYTFSRM

SEQ ID NO: 23239 - protein, 10 aa, BK virus
ISMYTFSRMK

SEQ ID NO: 23240 - protein, 10 aa, BK virus
SMYTFSRMKY

SEQ ID NO: 23241 - protein, 10 aa, BK virus
MYTFSRMKYN

SEQ ID NO: 23242 - protein, 10 aa, BK virus
YTFSRMKYNI

SEQ ID NO: 23243 - protein, 10 aa, BK virus
TFSRMKYNIC

SEQ ID NO: 23244 - protein, 10 aa, BK virus
FSRMKYNICM

SEQ ID NO: 23245 - protein, 10 aa, BK virus
SRMKYNICMG

SEQ ID NO: 23246 - protein, 10 aa, BK virus
RMKYNICMGK

SEQ ID NO: 23247 - protein, 10 aa, BK virus
MKYNICMGKC

SEQ ID NO: 23248 - protein, 10 aa, BK virus
KYNICMGKCI

SEQ ID NO: 23249 - protein, 10 aa, BK virus
YNICMGKCIL

SEQ ID NO: 23250 - protein, 10 aa, BK virus
NICMGKCILD

SEQ ID NO: 23251 - protein, 10 aa, BK virus
ICMGKCILDI

SEQ ID NO: 23252 - protein, 10 aa, BK virus
CMGKCILDIT

SEQ ID NO: 23253 - protein, 10 aa, BK virus
MGKCILDITR

SEQ ID NO: 23254 - protein, 10 aa, BK virus
GKCILDITRE

SEQ ID NO: 23255 - protein, 10 aa, BK virus
KCILDITREE

SEQ ID NO: 23256 - protein, 10 aa, BK virus
CILDITREED

SEQ ID NO: 23257 - protein, 10 aa, BK virus
ILDITREEDS

SEQ ID NO: 23258 - protein, 10 aa, BK virus
LDITREEDSE

SEQ ID NO: 23259 - protein, 10 aa, BK virus
DITREEDSET

SEQ ID NO: 23260 - protein, 10 aa, BK virus
ITREEDSETE

SEQ ID NO: 23261 - protein, 10 aa, BK virus
TREEDSETED

SEQ ID NO: 23262 - protein, 10 aa, BK virus
REEDSETEDS

SEQ ID NO: 23263 - protein, 10 aa, BK virus
EEDSETEDSG

SEQ ID NO: 23264 - protein, 10 aa, BK virus
EDSETEDSGH

SEQ ID NO: 23265 - protein, 10 aa, BK virus
DSETEDSGHG

SEQ ID NO: 23266 - protein, 10 aa, BK virus
SETEDSGHGS

SEQ ID NO: 23267 - protein, 10 aa, BK virus
ETEDSGHGSS

SEQ ID NO: 23268 - protein, 10 aa, BK virus
TEDSGHGSST

SEQ ID NO: 23269 - protein, 10 aa, BK virus
EDSGHGSSTE

SEQ ID NO: 23270 - protein, 10 aa, BK virus
DSGHGSSTES

SEQ ID NO: 23271 - protein, 10 aa, BK virus
SGHGSSTESQ

SEQ ID NO: 23272 - protein, 10 aa, BK virus
GHGSSTESQS

SEQ ID NO: 23273 - protein, 10 aa, BK virus
HGSSTESQSQ

SEQ ID NO: 23274 - protein, 10 aa, BK virus
GSSTESQSQC

SEQ ID NO: 23275 - protein, 10 aa, BK virus
SSTESQSQCS

SEQ ID NO: 23276 - protein, 10 aa, BK virus
STESQSQCSS

SEQ ID NO: 23277 - protein, 10 aa, BK virus
TESQSQCSSQ

SEQ ID NO: 23278 - protein, 10 aa, BK virus
ESQSQCSSQV

SEQ ID NO: 23279 - protein, 10 aa, BK virus
SQSQCSSQVS

SEQ ID NO: 23280 - protein, 10 aa, BK virus
QSQCSSQVSD

SEQ ID NO: 23281 - protein, 10 aa, BK virus
SQCSSQVSDT

SEQ ID NO: 23282 - protein, 10 aa, BK virus
QCSSQVSDTS

SEQ ID NO: 23283 - protein, 10 aa, BK virus
CSSQVSDTSA

SEQ ID NO: 23284 - protein, 10 aa, BK virus
SSQVSDTSAP

SEQ ID NO: 23285 - protein, 10 aa, BK virus
SQVSDTSAPA

SEQ ID NO: 23286 - protein, 10 aa, BK virus
QVSDTSAPAE

SEQ ID NO: 23287 - protein, 10 aa, BK virus
VSDTSAPAED

SEQ ID NO: 23288 - protein, 10 aa, BK virus
SDTSAPAEDS

SEQ ID NO: 23289 - protein, 10 aa, BK virus
DTSAPAEDSQ

SEQ ID NO: 23290 - protein, 10 aa, BK virus
TSAPAEDSQR

SEQ ID NO: 23291 - protein, 10 aa, BK virus
SAPAEDSQRS

SEQ ID NO: 23292 - protein, 10 aa, BK virus
APAEDSQRSD

SEQ ID NO: 23293 - protein, 10 aa, BK virus
PAEDSQRSDP

SEQ ID NO: 23294 - protein, 10 aa, BK virus
AEDSQRSDPH

SEQ ID NO: 23295 - protein, 10 aa, BK virus
EDSQRSDPHS

SEQ ID NO: 23296 - protein, 10 aa, BK virus
DSQRSDPHSQ

SEQ ID NO: 23297 - protein, 10 aa, BK virus
SQRSDPHSQE

SEQ ID NO: 23298 - protein, 10 aa, BK virus
QRSDPHSQEL

SEQ ID NO: 23299 - protein, 10 aa, BK virus
RSDPHSQELH

SEQ ID NO: 23300 - protein, 10 aa, BK virus
SDPHSQELHL

SEQ ID NO: 23301 - protein, 10 aa, BK virus
DPHSQELHLC

SEQ ID NO: 23302 - protein, 10 aa, BK virus
PHSQELHLCK

SEQ ID NO: 23303 - protein, 10 aa, BK virus
HSQELHLCKG

SEQ ID NO: 23304 - protein, 10 aa, BK virus
SQELHLCKGF

SEQ ID NO: 23305 - protein, 10 aa, BK virus
QELHLCKGFQ

SEQ ID NO: 23306 - protein, 10 aa, BK virus
ELHLCKGFQC

SEQ ID NO: 23307 - protein, 10 aa, BK virus
LHLCKGFQCF

SEQ ID NO: 23308 - protein, 10 aa, BK virus
HLCKGFQCFK

SEQ ID NO: 23309 - protein, 10 aa, BK virus
LCKGFQCFKR

SEQ ID NO: 23310 - protein, 10 aa, BK virus
CKGFQCFKRP

SEQ ID NO: 23311 - protein, 10 aa, BK virus
KGFQCFKRPK

SEQ ID NO: 23312 - protein, 10 aa, BK virus
GFQCFKRPKT

SEQ ID NO: 23313 - protein, 10 aa, BK virus
FQCFKRPKTP

SEQ ID NO: 23314 - protein, 10 aa, BK virus
QCFKRPKTPP

SEQ ID NO: 23315 - protein, 10 aa, BK virus
CFKRPKTPPP

SEQ ID NO: 23316 - protein, 10 aa, BK virus
FKRPKTPPPK

SEQ ID NO: 23317 - protein, 10 aa, BK virus
HKLKSGLYKS

SEQ ID NO: 23318 - protein, 10 aa, BK virus
KLKSGLYKSS

SEQ ID NO: 23319 - protein, 10 aa, BK virus
LKSGLYKSSI

SEQ ID NO: 23320 - protein, 10 aa, BK virus
KSGLYKSSIY

SEQ ID NO: 23321 - protein, 10 aa, BK virus
MYMYNKSTCL

SEQ ID NO: 23322 - protein, 10 aa, BK virus
YMYNKSTCLK

SEQ ID NO: 23323 - protein, 10 aa, BK virus
MYNKSTCLKH

SEQ ID NO: 23324 - protein, 10 aa, BK virus
YNKSTCLKHF

SEQ ID NO: 23325 - protein, 10 aa, BK virus
NKSTCLKHFG

SEQ ID NO: 23326 - protein, 10 aa, BK virus
KSTCLKHFGL

SEQ ID NO: 23327 - protein, 10 aa, BK virus
STCLKHFGLQ

SEQ ID NO: 23328 - protein, 10 aa, BK virus
TCLKHFGLQL

SEQ ID NO: 23329 - protein, 10 aa, BK virus
CLKHFGLQLS

SEQ ID NO: 23330 - protein, 10 aa, BK virus
LKHFGLQLSL

SEQ ID NO: 23331 - protein, 10 aa, BK virus
KHFGLQLSLF

SEQ ID NO: 23332 - protein, 10 aa, BK virus
HFGLQLSLFV

SEQ ID NO: 23333 - protein, 10 aa, BK virus
FGLQLSLFVN

SEQ ID NO: 23334 - protein, 10 aa, BK virus
GLQLSLFVNI

SEQ ID NO: 23335 - protein, 10 aa, BK virus
LQLSLFVNIS

SEQ ID NO: 23336 - protein, 10 aa, BK virus
QLSLFVNISY

SEQ ID NO: 23337 - protein, 10 aa, BK virus
LSLFVNISYH

SEQ ID NO: 23338 - protein, 10 aa, BK virus
SLFVNISYHI

SEQ ID NO: 23339 - protein, 10 aa, BK virus
LFVNISYHIW

SEQ ID NO: 23340 - protein, 10 aa, BK virus
FVNISYHIWV

SEQ ID NO: 23341 - protein, 10 aa, BK virus
VNISYHIWVP

SEQ ID NO: 23342 - protein, 10 aa, BK virus
NISYHIWVPW

SEQ ID NO: 23343 - protein, 10 aa, BK virus
ISYHIWVPWK

SEQ ID NO: 23344 - protein, 10 aa, BK virus
SYHIWVPWKS

SEQ ID NO: 23345 - protein, 10 aa, BK virus
YHIWVPWKSF

SEQ ID NO: 23346 - protein, 10 aa, BK virus
HIWVPWKSFC

SEQ ID NO: 23347 - protein, 10 aa, BK virus
IWVPWKSFCA

SEQ ID NO: 23348 - protein, 10 aa, BK virus
WVPWKSFCAI

SEQ ID NO: 23349 - protein, 10 aa, BK virus
VPWKSFCAIK

SEQ ID NO: 23350 - protein, 10 aa, BK virus
PWKSFCAIKH

SEQ ID NO: 23351 - protein, 10 aa, BK virus
WKSFCAIKHP

SEQ ID NO: 23352 - protein, 10 aa, BK virus
KSFCAIKHPN

SEQ ID NO: 23353 - protein, 10 aa, BK virus
SFCAIKHPNL

SEQ ID NO: 23354 - protein, 10 aa, BK virus
FCAIKHPNLF

SEQ ID NO: 23355 - protein, 10 aa, BK virus
CAIKHPNLFY

SEQ ID NO: 23356 - protein, 10 aa, BK virus
AIKHPNLFYL

SEQ ID NO: 23357 - protein, 10 aa, BK virus
IKHPNLFYLG

SEQ ID NO: 23358 - protein, 10 aa, BK virus
KHPNLFYLGF

SEQ ID NO: 23359 - protein, 10 aa, BK virus
HPNLFYLGFH

SEQ ID NO: 23360 - protein, 10 aa, BK virus
PNLFYLGFHT

SEQ ID NO: 23361 - protein, 10 aa, BK virus
NLFYLGFHTI

SEQ ID NO: 23362 - protein, 10 aa, BK virus
LFYLGFHTIH

SEQ ID NO: 23363 - protein, 10 aa, BK virus
FYLGFHTIHR

SEQ ID NO: 23364 - protein, 10 aa, BK virus
YLGFHTIHRL

SEQ ID NO: 23365 - protein, 10 aa, BK virus
LGFHTIHRLP

SEQ ID NO: 23366 - protein, 10 aa, BK virus
GFHTIHRLPI

SEQ ID NO: 23367 - protein, 10 aa, BK virus
FHTIHRLPIH

SEQ ID NO: 23368 - protein, 10 aa, BK virus
HTIHRLPIHS

SEQ ID NO: 23369 - protein, 10 aa, BK virus
TIHRLPIHSL

SEQ ID NO: 23370 - protein, 10 aa, BK virus
IHRLPIHSLG

SEQ ID NO: 23371 - protein, 10 aa, BK virus
HRLPIHSLGS

SEQ ID NO: 23372 - protein, 10 aa, BK virus
RLPIHSLGSP

SEQ ID NO: 23373 - protein, 10 aa, BK virus
LPIHSLGSPV

SEQ ID NO: 23374 - protein, 10 aa, BK virus
PIHSLGSPVY

SEQ ID NO: 23375 - protein, 10 aa, BK virus
IHSLGSPVYK

SEQ ID NO: 23376 - protein, 10 aa, BK virus
HSLGSPVYKV

SEQ ID NO: 23377 - protein, 10 aa, BK virus
SLGSPVYKVT

SEQ ID NO: 23378 - protein, 10 aa, BK virus
QKGNWVRILY

SEQ ID NO: 23379 - protein, 10 aa, BK virus
KGNWVRILYR

SEQ ID NO: 23380 - protein, 10 aa, BK virus
GNWVRILYRS

SEQ ID NO: 23381 - protein, 10 aa, BK virus
NWVRILYRSF

SEQ ID NO: 23382 - protein, 10 aa, BK virus
WVRILYRSFS

SEQ ID NO: 23383 - protein, 10 aa, BK virus
VRILYRSFSQ

SEQ ID NO: 23384 - protein, 10 aa, BK virus
RILYRSFSQA

SEQ ID NO: 23385 - protein, 10 aa, BK virus
ILYRSFSQAD

SEQ ID NO: 23386 - protein, 10 aa, BK virus
LYRSFSQADL

SEQ ID NO: 23387 - protein, 10 aa, BK virus
YRSFSQADLK

SEQ ID NO: 23388 - protein, 10 aa, BK virus
RSFSQADLKI

SEQ ID NO: 23389 - protein, 10 aa, BK virus
SFSQADLKIS

SEQ ID NO: 23390 - protein, 10 aa, BK virus
FSQADLKISC

SEQ ID NO: 23391 - protein, 10 aa, BK virus
SQADLKISCK

SEQ ID NO: 23392 - protein, 10 aa, BK virus
QADLKISCKA

SEQ ID NO: 23393 - protein, 10 aa, BK virus
ADLKISCKAS

SEQ ID NO: 23394 - protein, 10 aa, BK virus
DLKISCKASP

SEQ ID NO: 23395 - protein, 10 aa, BK virus
LKISCKASPL

SEQ ID NO: 23396 - protein, 10 aa, BK virus
KISCKASPLL

SEQ ID NO: 23397 - protein, 10 aa, BK virus
ISCKASPLLC

SEQ ID NO: 23398 - protein, 10 aa, BK virus
SCKASPLLCS

SEQ ID NO: 23399 - protein, 10 aa, BK virus
CKASPLLCSR

SEQ ID NO: 23400 - protein, 10 aa, BK virus
KASPLLCSRA

SEQ ID NO: 23401 - protein, 10 aa, BK virus
ASPLLCSRAV

SEQ ID NO: 23402 - protein, 10 aa, BK virus
SPLLCSRAVS

SEQ ID NO: 23403 - protein, 10 aa, BK virus
PLLCSRAVSK

SEQ ID NO: 23404 - protein, 10 aa, BK virus
LLCSRAVSKQ

SEQ ID NO: 23405 - protein, 10 aa, BK virus
LCSRAVSKQA

SEQ ID NO: 23406 - protein, 10 aa, BK virus
CSRAVSKQAT

SEQ ID NO: 23407 - protein, 10 aa, BK virus
SRAVSKQATN

SEQ ID NO: 23408 - protein, 10 aa, BK virus
RAVSKQATNI

SEQ ID NO: 23409 - protein, 10 aa, BK virus
AVSKQATNIS

SEQ ID NO: 23410 - protein, 10 aa, BK virus
VSKQATNISS

SEQ ID NO: 23411 - protein, 10 aa, BK virus
NIQAISFTKR

SEQ ID NO: 23412 - protein, 10 aa, BK virus
IQAISFTKRP

SEQ ID NO: 23413 - protein, 10 aa, BK virus
QAISFTKRPH

SEQ ID NO: 23414 - protein, 10 aa, BK virus
AISFTKRPHT

SEQ ID NO: 23415 - protein, 10 aa, BK virus
ISFTKRPHTL

SEQ ID NO: 23416 - protein, 10 aa, BK virus
SFTKRPHTLF

SEQ ID NO: 23417 - protein, 10 aa, BK virus
FTKRPHTLFI

SEQ ID NO: 23418 - protein, 10 aa, BK virus
QHCGSCVGHM

SEQ ID NO: 23419 - protein, 10 aa, BK virus
HCGSCVGHMK

SEQ ID NO: 23420 - protein, 10 aa, BK virus
CGSCVGHMKY

SEQ ID NO: 23421 - protein, 10 aa, BK virus
GSCVGHMKYW

SEQ ID NO: 23422 - protein, 10 aa, BK virus
SCVGHMKYWG

SEQ ID NO: 23423 - protein, 10 aa, BK virus
CVGHMKYWGN

SEQ ID NO: 23424 - protein, 10 aa, BK virus
VGHMKYWGNI

SEQ ID NO: 23425 - protein, 10 aa, BK virus
GHMKYWGNIF

SEQ ID NO: 23426 - protein, 10 aa, BK virus
HMKYWGNIFP

SEQ ID NO: 23427 - protein, 10 aa, BK virus
MKYWGNIFPS

SEQ ID NO: 23428 - protein, 10 aa, BK virus
KYWGNIFPSC

SEQ ID NO: 23429 - protein, 10 aa, BK virus
YWGNIFPSCE

SEQ ID NO: 23430 - protein, 10 aa, BK virus
WGNIFPSCES

SEQ ID NO: 23431 - protein, 10 aa, BK virus
GNIFPSCESP

SEQ ID NO: 23432 - protein, 10 aa, BK virus
NIFPSCESPK

SEQ ID NO: 23433 - protein, 10 aa, BK virus
IFPSCESPKI

SEQ ID NO: 23434 - protein, 10 aa, BK virus
FPSCESPKIP

SEQ ID NO: 23435 - protein, 10 aa, BK virus
PSCESPKIPS

SEQ ID NO: 23436 - protein, 10 aa, BK virus
SCESPKIPSI

SEQ ID NO: 23437 - protein, 10 aa, BK virus
CESPKIPSIF

SEQ ID NO: 23438 - protein, 10 aa, BK virus
ESPKIPSIFI

SEQ ID NO: 23439 - protein, 10 aa, BK virus
SPKIPSIFIS

SEQ ID NO: 23440 - protein, 10 aa, BK virus
PKIPSIFIST

SEQ ID NO: 23441 - protein, 10 aa, BK virus
KIPSIFISTG

SEQ ID NO: 23442 - protein, 10 aa, BK virus
IPSIFISTGI

SEQ ID NO: 23443 - protein, 10 aa, BK virus
PSIFISTGIR

SEQ ID NO: 23444 - protein, 10 aa, BK virus
SIFISTGIRY

SEQ ID NO: 23445 - protein, 10 aa, BK virus
IFISTGIRYP

SEQ ID NO: 23446 - protein, 10 aa, BK virus
FISTGIRYPA

SEQ ID NO: 23447 - protein, 10 aa, BK virus
ISTGIRYPAL

SEQ ID NO: 23448 - protein, 10 aa, BK virus
STGIRYPALN

SEQ ID NO: 23449 - protein, 10 aa, BK virus
TGIRYPALNW

SEQ ID NO: 23450 - protein, 10 aa, BK virus
GIRYPALNWI

SEQ ID NO: 23451 - protein, 10 aa, BK virus
IRYPALNWIS

SEQ ID NO: 23452 - protein, 10 aa, BK virus
RYPALNWISI

SEQ ID NO: 23453 - protein, 10 aa, BK virus
YPALNWISIV

SEQ ID NO: 23454 - protein, 10 aa, BK virus
PALNWISIVF

SEQ ID NO: 23455 - protein, 10 aa, BK virus
ALNWISIVFV

SEQ ID NO: 23456 - protein, 10 aa, BK virus
LNWISIVFVQ

SEQ ID NO: 23457 - protein, 10 aa, BK virus
NWISIVFVQI

SEQ ID NO: 23458 - protein, 10 aa, BK virus
WISIVFVQIG

SEQ ID NO: 23459 - protein, 10 aa, BK virus
ISIVFVQIGL

SEQ ID NO: 23460 - protein, 10 aa, BK virus
SIVFVQIGLM

SEQ ID NO: 23461 - protein, 10 aa, BK virus
IVFVQIGLMV

SEQ ID NO: 23462 - protein, 10 aa, BK virus
VFVQIGLMVS

SEQ ID NO: 23463 - protein, 10 aa, BK virus
FVQIGLMVSI

SEQ ID NO: 23464 - protein, 10 aa, BK virus
VQIGLMVSIH

SEQ ID NO: 23465 - protein, 10 aa, BK virus
QIGLMVSIHY

SEQ ID NO: 23466 - protein, 10 aa, BK virus
IGLMVSIHYL

SEQ ID NO: 23467 - protein, 10 aa, BK virus
GLMVSIHYLG

SEQ ID NO: 23468 - protein, 10 aa, BK virus
LMVSIHYLGL

SEQ ID NO: 23469 - protein, 10 aa, BK virus
MVSIHYLGLG

SEQ ID NO: 23470 - protein, 10 aa, BK virus
VSIHYLGLGC

SEQ ID NO: 23471 - protein, 10 aa, BK virus
SIHYLGLGCW

SEQ ID NO: 23472 - protein, 10 aa, BK virus
IHYLGLGCWV

SEQ ID NO: 23473 - protein, 10 aa, BK virus
HYLGLGCWVF

SEQ ID NO: 23474 - protein, 10 aa, BK virus
YLGLGCWVFR

SEQ ID NO: 23475 - protein, 10 aa, BK virus
LGLGCWVFRG

SEQ ID NO: 23476 - protein, 10 aa, BK virus
GLGCWVFRGY

SEQ ID NO: 23477 - protein, 10 aa, BK virus
LGCWVFRGYS

SEQ ID NO: 23478 - protein, 10 aa, BK virus
GCWVFRGYST

SEQ ID NO: 23479 - protein, 10 aa, BK virus
CWVFRGYSTI

SEQ ID NO: 23480 - protein, 10 aa, BK virus
WVFRGYSTIR

SEQ ID NO: 23481 - protein, 10 aa, BK virus
VFRGYSTIRV

SEQ ID NO: 23482 - protein, 10 aa, BK virus
FRGYSTIRVL

SEQ ID NO: 23483 - protein, 10 aa, BK virus
HSLHFQGFST

SEQ ID NO: 23484 - protein, 10 aa, BK virus
SLHFQGFSTY

SEQ ID NO: 23485 - protein, 10 aa, BK virus
LHFQGFSTYS

SEQ ID NO: 23486 - protein, 10 aa, BK virus
HFQGFSTYSK

SEQ ID NO: 23487 - protein, 10 aa, BK virus
FQGFSTYSKE

SEQ ID NO: 23488 - protein, 10 aa, BK virus
QGFSTYSKEV

SEQ ID NO: 23489 - protein, 10 aa, BK virus
GFSTYSKEVE

SEQ ID NO: 23490 - protein, 10 aa, BK virus
FSTYSKEVEI

SEQ ID NO: 23491 - protein, 10 aa, BK virus
STYSKEVEIT

SEQ ID NO: 23492 - protein, 10 aa, BK virus
TYSKEVEITA

SEQ ID NO: 23493 - protein, 10 aa, BK virus
YSKEVEITAL

SEQ ID NO: 23494 - protein, 10 aa, BK virus
SKEVEITALN

SEQ ID NO: 23495 - protein, 10 aa, BK virus
KEVEITALNR

SEQ ID NO: 23496 - protein, 10 aa, BK virus
EVEITALNRF

SEQ ID NO: 23497 - protein, 10 aa, BK virus
VEITALNRFS

SEQ ID NO: 23498 - protein, 10 aa, BK virus
EITALNRFSS

SEQ ID NO: 23499 - protein, 10 aa, BK virus
ITALNRFSST

SEQ ID NO: 23500 - protein, 10 aa, BK virus
TALNRFSSTM

SEQ ID NO: 23501 - protein, 10 aa, BK virus
ALNRFSSTML

SEQ ID NO: 23502 - protein, 10 aa, BK virus
LNRFSSTMLM

SEQ ID NO: 23503 - protein, 10 aa, BK virus
NRFSSTMLMH

SEQ ID NO: 23504 - protein, 10 aa, BK virus
RFSSTMLMHF

SEQ ID NO: 23505 - protein, 10 aa, BK virus
FSSTMLMHFL

SEQ ID NO: 23506 - protein, 10 aa, BK virus
PCMKVKHASY

SEQ ID NO: 23507 - protein, 10 aa, BK virus
CMKVKHASYS

SEQ ID NO: 23508 - protein, 10 aa, BK virus
MKVKHASYSN

SEQ ID NO: 23509 - protein, 10 aa, BK virus
KVKHASYSNN

SEQ ID NO: 23510 - protein, 10 aa, BK virus
VKHASYSNNL

SEQ ID NO: 23511 - protein, 10 aa, BK virus
KHASYSNNLC

SEQ ID NO: 23512 - protein, 10 aa, BK virus
HASYSNNLCL

SEQ ID NO: 23513 - protein, 10 aa, BK virus
ASYSNNLCLY

SEQ ID NO: 23514 - protein, 10 aa, BK virus
SYSNNLCLYS

SEQ ID NO: 23515 - protein, 10 aa, BK virus
YSNNLCLYSY

SEQ ID NO: 23516 - protein, 10 aa, BK virus
SNNLCLYSYS

SEQ ID NO: 23517 - protein, 10 aa, BK virus
NNLCLYSYSL

SEQ ID NO: 23518 - protein, 10 aa, BK virus
NLCLYSYSLP

SEQ ID NO: 23519 - protein, 10 aa, BK virus
LCLYSYSLPH

SEQ ID NO: 23520 - protein, 10 aa, BK virus
CLYSYSLPHQ

SEQ ID NO: 23521 - protein, 10 aa, BK virus
IGEGNSCCAV

SEQ ID NO: 23522 - protein, 10 aa, BK virus
GEGNSCCAVT

SEQ ID NO: 23523 - protein, 10 aa, BK virus
EGNSCCAVTG

SEQ ID NO: 23524 - protein, 10 aa, BK virus
GNSCCAVTGK

SEQ ID NO: 23525 - protein, 10 aa, BK virus
NSCCAVTGKH

SEQ ID NO: 23526 - protein, 10 aa, BK virus
SCCAVTGKHF

SEQ ID NO: 23527 - protein, 10 aa, BK virus
CCAVTGKHFS

SEQ ID NO: 23528 - protein, 10 aa, BK virus
CAVTGKHFSL

SEQ ID NO: 23529 - protein, 10 aa, BK virus
AVTGKHFSLW

SEQ ID NO: 23530 - protein, 10 aa, BK virus
VTGKHFSLWA

SEQ ID NO: 23531 - protein, 10 aa, BK virus
TGKHFSLWAI

SEQ ID NO: 23532 - protein, 10 aa, BK virus
GKHFSLWAIT

SEQ ID NO: 23533 - protein, 10 aa, BK virus
KHFSLWAITA

SEQ ID NO: 23534 - protein, 10 aa, BK virus
HFSLWAITAK

SEQ ID NO: 23535 - protein, 10 aa, BK virus
FSLWAITAKV

SEQ ID NO: 23536 - protein, 10 aa, BK virus
SLWAITAKVI

SEQ ID NO: 23537 - protein, 10 aa, BK virus
LWAITAKVIF

SEQ ID NO: 23538 - protein, 10 aa, BK virus
WAITAKVIFS

SEQ ID NO: 23539 - protein, 10 aa, BK virus
AITAKVIFST

SEQ ID NO: 23540 - protein, 10 aa, BK virus
TKAPKVFIWI

SEQ ID NO: 23541 - protein, 10 aa, BK virus
KAPKVFIWIP

SEQ ID NO: 23542 - protein, 10 aa, BK virus
APKVFIWIPH

SEQ ID NO: 23543 - protein, 10 aa, BK virus
PKVFIWIPHF

SEQ ID NO: 23544 - protein, 10 aa, BK virus
KVFIWIPHFW

SEQ ID NO: 23545 - protein, 10 aa, BK virus
VFIWIPHFWV

SEQ ID NO: 23546 - protein, 10 aa, BK virus
EAFYLCNSIY

SEQ ID NO: 23547 - protein, 10 aa, BK virus
AFYLCNSIYP

SEQ ID NO: 23548 - protein, 10 aa, BK virus
FYLCNSIYPS

SEQ ID NO: 23549 - protein, 10 aa, BK virus
YLCNSIYPSF

SEQ ID NO: 23550 - protein, 10 aa, BK virus
LCNSIYPSFN

SEQ ID NO: 23551 - protein, 10 aa, BK virus
CNSIYPSFNF

SEQ ID NO: 23552 - protein, 10 aa, BK virus
FWHLHGFLWL

SEQ ID NO: 23553 - protein, 10 aa, BK virus
WHLHGFLWLF

SEQ ID NO: 23554 - protein, 10 aa, BK virus
HLHGFLWLFG

SEQ ID NO: 23555 - protein, 10 aa, BK virus
LHGFLWLFGS

SEQ ID NO: 23556 - protein, 10 aa, BK virus
HGFLWLFGSC

SEQ ID NO: 23557 - protein, 10 aa, BK virus
GFLWLFGSCP

SEQ ID NO: 23558 - protein, 10 aa, BK virus
FLWLFGSCPW

SEQ ID NO: 23559 - protein, 10 aa, BK virus
LWLFGSCPWT

SEQ ID NO: 23560 - protein, 10 aa, BK virus
WLFGSCPWTL

SEQ ID NO: 23561 - protein, 10 aa, BK virus
LFGSCPWTLS

SEQ ID NO: 23562 - protein, 10 aa, BK virus
FGSCPWTLSF

SEQ ID NO: 23563 - protein, 10 aa, BK virus
GSCPWTLSFS

SEQ ID NO: 23564 - protein, 10 aa, BK virus
SCPWTLSFSF

SEQ ID NO: 23565 - protein, 10 aa, BK virus
CPWTLSFSFG

SEQ ID NO: 23566 - protein, 10 aa, BK virus
PWTLSFSFGW

SEQ ID NO: 23567 - protein, 10 aa, BK virus
WTLSFSFGWG

SEQ ID NO: 23568 - protein, 10 aa, BK virus
TLSFSFGWGH

SEQ ID NO: 23569 - protein, 10 aa, BK virus
LSFSFGWGHL

SEQ ID NO: 23570 - protein, 10 aa, BK virus
SFSFGWGHLH

SEQ ID NO: 23571 - protein, 10 aa, BK virus
FSFGWGHLHM

SEQ ID NO: 23572 - protein, 10 aa, BK virus
SFGWGHLHML

SEQ ID NO: 23573 - protein, 10 aa, BK virus
FGWGHLHMLQ

SEQ ID NO: 23574 - protein, 10 aa, BK virus
GWGHLHMLQE

SEQ ID NO: 23575 - protein, 10 aa, BK virus
WGHLHMLQEQ

SEQ ID NO: 23576 - protein, 10 aa, BK virus
GHLHMLQEQV

SEQ ID NO: 23577 - protein, 10 aa, BK virus
HLHMLQEQVL

SEQ ID NO: 23578 - protein, 10 aa, BK virus
LHMLQEQVLQ

SEQ ID NO: 23579 - protein, 10 aa, BK virus
HMLQEQVLQS

SEQ ID NO: 23580 - protein, 10 aa, BK virus
MLQEQVLQSR

SEQ ID NO: 23581 - protein, 10 aa, BK virus
LQEQVLQSRT

SEQ ID NO: 23582 - protein, 10 aa, BK virus
QEQVLQSRTG

SEQ ID NO: 23583 - protein, 10 aa, BK virus
EQVLQSRTGL

SEQ ID NO: 23584 - protein, 10 aa, BK virus
QVLQSRTGLE

SEQ ID NO: 23585 - protein, 10 aa, BK virus
VLQSRTGLEV

SEQ ID NO: 23586 - protein, 10 aa, BK virus
LQSRTGLEVK

SEQ ID NO: 23587 - protein, 10 aa, BK virus
QSRTGLEVKA

SEQ ID NO: 23588 - protein, 10 aa, BK virus
SRTGLEVKAT

SEQ ID NO: 23589 - protein, 10 aa, BK virus
RTGLEVKATS

SEQ ID NO: 23590 - protein, 10 aa, BK virus
TGLEVKATSI

SEQ ID NO: 23591 - protein, 10 aa, BK virus
GLEVKATSIE

SEQ ID NO: 23592 - protein, 10 aa, BK virus
LEVKATSIEE

SEQ ID NO: 23593 - protein, 10 aa, BK virus
EVKATSIEEQ

SEQ ID NO: 23594 - protein, 10 aa, BK virus
VKATSIEEQF

SEQ ID NO: 23595 - protein, 10 aa, BK virus
KATSIEEQFF

SEQ ID NO: 23596 - protein, 10 aa, BK virus
ATSIEEQFFD

SEQ ID NO: 23597 - protein, 10 aa, BK virus
TLLNVHFVDF

SEQ ID NO: 23598 - protein, 10 aa, BK virus
LLNVHFVDFL

SEQ ID NO: 23599 - protein, 10 aa, BK virus
LNVHFVDFLS

SEQ ID NO: 23600 - protein, 10 aa, BK virus
NVHFVDFLSP

SEQ ID NO: 23601 - protein, 10 aa, BK virus
VHFVDFLSPF

SEQ ID NO: 23602 - protein, 10 aa, BK virus
HFVDFLSPFF

SEQ ID NO: 23603 - protein, 10 aa, BK virus
FVDFLSPFFV

SEQ ID NO: 23604 - protein, 10 aa, BK virus
LLLYCQHHLY

SEQ ID NO: 23605 - protein, 10 aa, BK virus
LLYCQHHLYY

SEQ ID NO: 23606 - protein, 10 aa, BK virus
LYCQHHLYYK

SEQ ID NO: 23607 - protein, 10 aa, BK virus
YCQHHLYYKY

SEQ ID NO: 23608 - protein, 10 aa, BK virus
CQHHLYYKYG

SEQ ID NO: 23609 - protein, 10 aa, BK virus
QHHLYYKYGQ

SEQ ID NO: 23610 - protein, 10 aa, BK virus
HHLYYKYGQN

SEQ ID NO: 23611 - protein, 10 aa, BK virus
HLYYKYGQNV

SEQ ID NO: 23612 - protein, 10 aa, BK virus
LYYKYGQNVH

SEQ ID NO: 23613 - protein, 10 aa, BK virus
YYKYGQNVHG

SEQ ID NO: 23614 - protein, 10 aa, BK virus
YKYGQNVHGY

SEQ ID NO: 23615 - protein, 10 aa, BK virus
KYGQNVHGYL

SEQ ID NO: 23616 - protein, 10 aa, BK virus
YGQNVHGYLP

SEQ ID NO: 23617 - protein, 10 aa, BK virus
GQNVHGYLPF

SEQ ID NO: 23618 - protein, 10 aa, BK virus
QNVHGYLPFQ

SEQ ID NO: 23619 - protein, 10 aa, BK virus
NVHGYLPFQL

SEQ ID NO: 23620 - protein, 10 aa, BK virus
VHGYLPFQLL

SEQ ID NO: 23621 - protein, 10 aa, BK virus
HGYLPFQLLV

SEQ ID NO: 23622 - protein, 10 aa, BK virus
GKDQNNIVEY

SEQ ID NO: 23623 - protein, 10 aa, BK virus
KDQNNIVEYN

SEQ ID NO: 23624 - protein, 10 aa, BK virus
DQNNIVEYNY

SEQ ID NO: 23625 - protein, 10 aa, BK virus
QNNIVEYNYK

SEQ ID NO: 23626 - protein, 10 aa, BK virus
NNIVEYNYKS

SEQ ID NO: 23627 - protein, 10 aa, BK virus
NIVEYNYKSL

SEQ ID NO: 23628 - protein, 10 aa, BK virus
KIFLFFSAIP

SEQ ID NO: 23629 - protein, 10 aa, BK virus
IFLFFSAIPV

SEQ ID NO: 23630 - protein, 10 aa, BK virus
FLFFSAIPVR

SEQ ID NO: 23631 - protein, 10 aa, BK virus
LFFSAIPVRL

SEQ ID NO: 23632 - protein, 10 aa, BK virus
QKYLHQETEY

SEQ ID NO: 23633 - protein, 10 aa, BK virus
KYLHQETEYH

SEQ ID NO: 23634 - protein, 10 aa, BK virus
YLHQETEYHS

SEQ ID NO: 23635 - protein, 10 aa, BK virus
LHQETEYHST

SEQ ID NO: 23636 - protein, 10 aa, BK virus
HQETEYHSTH

SEQ ID NO: 23637 - protein, 10 aa, BK virus
QETEYHSTHL

SEQ ID NO: 23638 - protein, 10 aa, BK virus
ETEYHSTHLG

SEQ ID NO: 23639 - protein, 10 aa, BK virus
TIPKPCLIAD

SEQ ID NO: 23640 - protein, 10 aa, BK virus
IPKPCLIADR

SEQ ID NO: 23641 - protein, 10 aa, BK virus
PKPCLIADRG

SEQ ID NO: 23642 - protein, 10 aa, BK virus
KPCLIADRGL

SEQ ID NO: 23643 - protein, 10 aa, BK virus
PCLIADRGLQ

SEQ ID NO: 23644 - protein, 10 aa, BK virus
CLIADRGLQW

SEQ ID NO: 23645 - protein, 10 aa, BK virus
LIADRGLQWK

SEQ ID NO: 23646 - protein, 10 aa, BK virus
IADRGLQWKL

SEQ ID NO: 23647 - protein, 10 aa, BK virus
ADRGLQWKLC

SEQ ID NO: 23648 - protein, 10 aa, BK virus
DRGLQWKLCD

SEQ ID NO: 23649 - protein, 10 aa, BK virus
RGLQWKLCDP

SEQ ID NO: 23650 - protein, 10 aa, BK virus
GLQWKLCDPN

SEQ ID NO: 23651 - protein, 10 aa, BK virus
LQWKLCDPNH

SEQ ID NO: 23652 - protein, 10 aa, BK virus
QWKLCDPNHQ

SEQ ID NO: 23653 - protein, 10 aa, BK virus
WKLCDPNHQR

SEQ ID NO: 23654 - protein, 10 aa, BK virus
KLCDPNHQRT

SEQ ID NO: 23655 - protein, 10 aa, BK virus
LCDPNHQRTY

SEQ ID NO: 23656 - protein, 10 aa, BK virus
CDPNHQRTYT

SEQ ID NO: 23657 - protein, 10 aa, BK virus
DPNHQRTYTL

SEQ ID NO: 23658 - protein, 10 aa, BK virus
PNHQRTYTLL

SEQ ID NO: 23659 - protein, 10 aa, BK virus
NHQRTYTLLE

SEQ ID NO: 23660 - protein, 10 aa, BK virus
HQRTYTLLEL

SEQ ID NO: 23661 - protein, 10 aa, BK virus
QRTYTLLELR

SEQ ID NO: 23662 - protein, 10 aa, BK virus
RTYTLLELRN

SEQ ID NO: 23663 - protein, 10 aa, BK virus
QFELKQQTQQ

SEQ ID NO: 23664 - protein, 10 aa, BK virus
PQEHQQLQHM

SEQ ID NO: 23665 - protein, 10 aa, BK virus
QEHQQLQHMF

SEQ ID NO: 23666 - protein, 10 aa, BK virus
EHQQLQHMFE

SEQ ID NO: 23667 - protein, 10 aa, BK virus
HQQLQHMFEE

SEQ ID NO: 23668 - protein, 10 aa, BK virus
QQLQHMFEEL

SEQ ID NO: 23669 - protein, 10 aa, BK virus
QLQHMFEELG

SEQ ID NO: 23670 - protein, 10 aa, BK virus
LQHMFEELGL

SEQ ID NO: 23671 - protein, 10 aa, BK virus
PLRYLLCPLQ

SEQ ID NO: 23672 - protein, 10 aa, BK virus
QQQPPQQQFQ

SEQ ID NO: 23673 - protein, 10 aa, BK virus
QQPPQQQFQP

SEQ ID NO: 23674 - protein, 10 aa, BK virus
QPPQQQFQPL

SEQ ID NO: 23675 - protein, 10 aa, BK virus
PPQQQFQPLK

SEQ ID NO: 23676 - protein, 10 aa, BK virus
PQQQFQPLKI

SEQ ID NO: 23677 - protein, 10 aa, BK virus
QQQFQPLKIL

SEQ ID NO: 23678 - protein, 10 aa, BK virus
QQFQPLKILW

SEQ ID NO: 23679 - protein, 10 aa, BK virus
QFQPLKILWQ

SEQ ID NO: 23680 - protein, 10 aa, BK virus
FQPLKILWQQ

SEQ ID NO: 23681 - protein, 10 aa, BK virus
QPLKILWQQQ

SEQ ID NO: 23682 - protein, 10 aa, BK virus
PLKILWQQQP

SEQ ID NO: 23683 - protein, 10 aa, BK virus
LKILWQQQPQ

SEQ ID NO: 23684 - protein, 10 aa, BK virus
KILWQQQPQI

SEQ ID NO: 23685 - protein, 10 aa, BK virus
ILWQQQPQIH

SEQ ID NO: 23686 - protein, 10 aa, BK virus
LWQQQPQIHW

SEQ ID NO: 23687 - protein, 10 aa, BK virus
WQQQPQIHWQ

SEQ ID NO: 23688 - protein, 10 aa, BK virus
QQQPQIHWQL

SEQ ID NO: 23689 - protein, 10 aa, BK virus
QQPQIHWQLG

SEQ ID NO: 23690 - protein, 10 aa, BK virus
QPQIHWQLGP

SEQ ID NO: 23691 - protein, 10 aa, BK virus
PQIHWQLGPP

SEQ ID NO: 23692 - protein, 10 aa, BK virus
QIHWQLGPPK

SEQ ID NO: 23693 - protein, 10 aa, BK virus
IHWQLGPPKV

SEQ ID NO: 23694 - protein, 10 aa, BK virus
HWQLGPPKVL

SEQ ID NO: 23695 - protein, 10 aa, BK virus
WQLGPPKVLE

SEQ ID NO: 23696 - protein, 10 aa, BK virus
QLGPPKVLEQ

SEQ ID NO: 23697 - protein, 10 aa, BK virus
LGPPKVLEQH

SEQ ID NO: 23698 - protein, 10 aa, BK virus
GPPKVLEQHP

SEQ ID NO: 23699 - protein, 10 aa, BK virus
TWKYKKKGIT

SEQ ID NO: 23700 - protein, 10 aa, BK virus
WKYKKKGITY

SEQ ID NO: 23701 - protein, 10 aa, BK virus
KYKKKGITYL

SEQ ID NO: 23702 - protein, 10 aa, BK virus
YKKKGITYLG

SEQ ID NO: 23703 - protein, 10 aa, BK virus
KKKGITYLGV

SEQ ID NO: 23704 - protein, 10 aa, BK virus
KKGITYLGVF

SEQ ID NO: 23705 - protein, 10 aa, BK virus
KGITYLGVFY

SEQ ID NO: 23706 - protein, 10 aa, BK virus
GITYLGVFYR

SEQ ID NO: 23707 - protein, 10 aa, BK virus
ITYLGVFYRV

SEQ ID NO: 23708 - protein, 10 aa, BK virus
TYLGVFYRVF

SEQ ID NO: 23709 - protein, 10 aa, BK virus
YLGVFYRVFY

SEQ ID NO: 23710 - protein, 10 aa, BK virus
LGVFYRVFYS

SEQ ID NO: 23711 - protein, 10 aa, BK virus
GVFYRVFYSR

SEQ ID NO: 23712 - protein, 10 aa, BK virus
SSGTFVFPVY

SEQ ID NO: 23713 - protein, 10 aa, BK virus
SGTFVFPVYT

SEQ ID NO: 23714 - protein, 10 aa, BK virus
GTFVFPVYTV

SEQ ID NO: 23715 - protein, 10 aa, BK virus
TFVFPVYTVF

SEQ ID NO: 23716 - protein, 10 aa, BK virus
FVFPVYTVFT

SEQ ID NO: 23717 - protein, 10 aa, BK virus
VFPVYTVFTS

SEQ ID NO: 23718 - protein, 10 aa, BK virus
FPVYTVFTST

SEQ ID NO: 23719 - protein, 10 aa, BK virus
PVYTVFTSTK

SEQ ID NO: 23720 - protein, 10 aa, BK virus
VYTVFTSTKF

SEQ ID NO: 23721 - protein, 10 aa, BK virus
YTVFTSTKFQ

SEQ ID NO: 23722 - protein, 10 aa, BK virus
TVFTSTKFQQ

SEQ ID NO: 23723 - protein, 10 aa, BK virus
VFTSTKFQQK

SEQ ID NO: 23724 - protein, 10 aa, BK virus
FTSTKFQQKL

SEQ ID NO: 23725 - protein, 10 aa, BK virus
NKNKNPLSSF

SEQ ID NO: 23726 - protein, 10 aa, BK virus
KNKNPLSSFF

SEQ ID NO: 23727 - protein, 10 aa, BK virus
NKNPLSSFFC

SEQ ID NO: 23728 - protein, 10 aa, BK virus
KNPLSSFFCS

SEQ ID NO: 23729 - protein, 10 aa, BK virus
NPLSSFFCSS

SEQ ID NO: 23730 - protein, 10 aa, BK virus
PLSSFFCSSP

SEQ ID NO: 23731 - protein, 10 aa, BK virus
LSSFFCSSPG

SEQ ID NO: 23732 - protein, 10 aa, BK virus
SSFFCSSPGF

SEQ ID NO: 23733 - protein, 10 aa, BK virus
SFFCSSPGFT

SEQ ID NO: 23734 - protein, 10 aa, BK virus
FFCSSPGFTN

SEQ ID NO: 23735 - protein, 10 aa, BK virus
FCSSPGFTNF

SEQ ID NO: 23736 - protein, 10 aa, BK virus
CSSPGFTNFH

SEQ ID NO: 23737 - protein, 10 aa, BK virus
QLAQNHGLCP

SEQ ID NO: 23738 - protein, 10 aa, BK virus
LAQNHGLCPV

SEQ ID NO: 23739 - protein, 10 aa, BK virus
LGTRPRFLGS

SEQ ID NO: 23740 - protein, 10 aa, BK virus
GTRPRFLGSQ

SEQ ID NO: 23741 - protein, 10 aa, BK virus
TRPRFLGSQN

SEQ ID NO: 23742 - protein, 10 aa, BK virus
RPRFLGSQNM

SEQ ID NO: 23743 - protein, 10 aa, BK virus
PRFLGSQNMS

SEQ ID NO: 23744 - protein, 10 aa, BK virus
RFLGSQNMSV

SEQ ID NO: 23745 - protein, 10 aa, BK virus
FLGSQNMSVM

SEQ ID NO: 23746 - protein, 10 aa, BK virus
LGSQNMSVMH

SEQ ID NO: 23747 - protein, 10 aa, BK virus
GSQNMSVMHF

SEQ ID NO: 23748 - protein, 10 aa, BK virus
SQNMSVMHFP

SEQ ID NO: 23749 - protein, 10 aa, BK virus
QNMSVMHFPS

SEQ ID NO: 23750 - protein, 10 aa, BK virus
AAPPCESCTF

SEQ ID NO: 23751 - protein, 10 aa, BK virus
APPCESCTFL

SEQ ID NO: 23752 - protein, 10 aa, BK virus
PPCESCTFLP

SEQ ID NO: 23753 - protein, 10 aa, BK virus
PCESCTFLPE

SEQ ID NO: 23754 - protein, 10 aa, BK virus
CESCTFLPEV

SEQ ID NO: 23755 - protein, 10 aa, BK virus
ESCTFLPEVM

SEQ ID NO: 23756 - protein, 10 aa, BK virus
SCTFLPEVMV

SEQ ID NO: 23757 - protein, 10 aa, BK virus
CTFLPEVMVW

SEQ ID NO: 23758 - protein, 10 aa, BK virus
TFLPEVMVWL

SEQ ID NO: 23759 - protein, 10 aa, BK virus
FLPEVMVWLH

SEQ ID NO: 23760 - protein, 10 aa, BK virus
LPEVMVWLHS

SEQ ID NO: 23761 - protein, 10 aa, BK virus
PEVMVWLHSP

SEQ ID NO: 23762 - protein, 10 aa, BK virus
EVMVWLHSPV

SEQ ID NO: 23763 - protein, 10 aa, BK virus
VMVWLHSPVS

SEQ ID NO: 23764 - protein, 10 aa, BK virus
MVWLHSPVSH

SEQ ID NO: 23765 - protein, 10 aa, BK virus
VWLHSPVSHA

SEQ ID NO: 23766 - protein, 10 aa, BK virus
WLHSPVSHAL

SEQ ID NO: 23767 - protein, 10 aa, BK virus
LHSPVSHALS

SEQ ID NO: 23768 - protein, 10 aa, BK virus
HSPVSHALSF

SEQ ID NO: 23769 - protein, 10 aa, BK virus
SPVSHALSFL

SEQ ID NO: 23770 - protein, 10 aa, BK virus
PVSHALSFLR

SEQ ID NO: 23771 - protein, 10 aa, BK virus
VSHALSFLRS

SEQ ID NO: 23772 - protein, 10 aa, BK virus
SHALSFLRSW

SEQ ID NO: 23773 - protein, 10 aa, BK virus
HALSFLRSWF

SEQ ID NO: 23774 - protein, 10 aa, BK virus
ALSFLRSWFG

SEQ ID NO: 23775 - protein, 10 aa, BK virus
LSFLRSWFGC

SEQ ID NO: 23776 - protein, 10 aa, BK virus
SFLRSWFGCI

SEQ ID NO: 23777 - protein, 10 aa, BK virus
FLRSWFGCIP

SEQ ID NO: 23778 - protein, 10 aa, BK virus
LRSWFGCIPW

SEQ ID NO: 23779 - protein, 10 aa, BK virus
RSWFGCIPWV

SEQ ID NO: 23780 - protein, 10 aa, BK virus
SWFGCIPWVS

SEQ ID NO: 23781 - protein, 10 aa, BK virus
WFGCIPWVSS

SEQ ID NO: 23782 - protein, 10 aa, BK virus
FGCIPWVSSS

SEQ ID NO: 23783 - protein, 10 aa, BK virus
GCIPWVSSSS

SEQ ID NO: 23784 - protein, 10 aa, BK virus
CIPWVSSSSL

SEQ ID NO: 23785 - protein, 10 aa, BK virus
IPWVSSSSLW

SEQ ID NO: 23786 - protein, 10 aa, BK virus
PWVSSSSLWP

SEQ ID NO: 23787 - protein, 10 aa, BK virus
WVSSSSLWPF

SEQ ID NO: 23788 - protein, 10 aa, BK virus
VSSSSLWPFF

SEQ ID NO: 23789 - protein, 10 aa, BK virus
SSSSLWPFFL

SEQ ID NO: 23790 - protein, 10 aa, BK virus
YIRGRGRLCL

SEQ ID NO: 23791 - protein, 10 aa, BK virus
IRGRGRLCLH

SEQ ID NO: 23792 - protein, 10 aa, BK virus
RGRGRLCLHP

SEQ ID NO: 23793 - protein, 10 aa, BK virus
GRGRLCLHPF

SEQ ID NO: 23794 - protein, 10 aa, BK virus
RGRLCLHPFS

SEQ ID NO: 23795 - protein, 10 aa, BK virus
GRLCLHPFSQ

SEQ ID NO: 23796 - protein, 10 aa, BK virus
RLCLHPFSQV

SEQ ID NO: 23797 - protein, 10 aa, BK virus
LCLHPFSQVV

SEQ ID NO: 23798 - protein, 10 aa, BK virus
CLHPFSQVVR

SEQ ID NO: 23799 - protein, 10 aa, BK virus
LHPFSQVVRV

SEQ ID NO: 23800 - protein, 10 aa, BK virus
HPFSQVVRVW

SEQ ID NO: 23801 - protein, 10 aa, BK virus
PFSQVVRVWR

SEQ ID NO: 23802 - protein, 10 aa, BK virus
FSQVVRVWRL

SEQ ID NO: 23803 - protein, 10 aa, BK virus
SQVVRVWRLF

SEQ ID NO: 23804 - protein, 10 aa, BK virus
QVVRVWRLFL

SEQ ID NO: 23805 - protein, 10 aa, BK virus
VVRVWRLFLR

SEQ ID NO: 23806 - protein, 10 aa, BK virus
VRVWRLFLRP

SEQ ID NO: 23807 - protein, 10 aa, BK virus
RVWRLFLRPS

SEQ ID NO: 23808 - protein, 10 aa, BK virus
VWRLFLRPSK

SEQ ID NO: 23809 - protein, 10 aa, BK virus
WRLFLRPSKT

SEQ ID NO: 23810 - protein, 10 aa, BK virus
RLFLRPSKTI

SEQ ID NO: 23811 - protein, 10 aa, BK virus
LFLRPSKTIW

SEQ ID NO: 23812 - protein, 10 aa, BK virus
FLRPSKTIWG

SEQ ID NO: 23813 - protein, 10 aa, BK virus
LRPSKTIWGN

SEQ ID NO: 23814 - protein, 10 aa, BK virus
RPSKTIWGNP

SEQ ID NO: 23815 - protein, 10 aa, BK virus
PSKTIWGNPY

SEQ ID NO: 23816 - protein, 10 aa, BK virus
SKTIWGNPYS

SEQ ID NO: 23817 - protein, 10 aa, BK virus
KTIWGNPYSF

SEQ ID NO: 23818 - protein, 10 aa, BK virus
TIWGNPYSFA

SEQ ID NO: 23819 - protein, 10 aa, BK virus
IWGNPYSFAI

SEQ ID NO: 23820 - protein, 10 aa, BK virus
WGNPYSFAIF

SEQ ID NO: 23821 - protein, 10 aa, BK virus
GNPYSFAIFA

SEQ ID NO: 23822 - protein, 10 aa, BK virus
NPYSFAIFAK

SEQ ID NO: 23823 - protein, 11 aa, BK virus
QGRIHGAHGPF

SEQ ID NO: 23824 - protein, 11 aa, BK virus
GRIHGAHGPFR

SEQ ID NO: 23825 - protein, 11 aa, BK virus
RIHGAHGPFRP

SEQ ID NO: 23826 - protein, 11 aa, BK virus
KSCLGKSSLNE

SEQ ID NO: 23827 - protein, 11 aa, BK virus
SCLGKSSLNEK

SEQ ID NO: 23828 - protein, 11 aa, BK virus
CLGKSSLNEKS

SEQ ID NO: 23829 - protein, 11 aa, BK virus
LGKSSLNEKSL

SEQ ID NO: 23830 - protein, 11 aa, BK virus
GKSSLNEKSLF

SEQ ID NO: 23831 - protein, 11 aa, BK virus
KSSLNEKSLFK

SEQ ID NO: 23832 - protein, 11 aa, BK virus
SSLNEKSLFKE

SEQ ID NO: 23833 - protein, 11 aa, BK virus
SLNEKSLFKEV

SEQ ID NO: 23834 - protein, 11 aa, BK virus
KNGAGCKGSSS

SEQ ID NO: 23835 - protein, 11 aa, BK virus
NGAGCKGSSSA

SEQ ID NO: 23836 - protein, 11 aa, BK virus
FSSLPRYPVLQ

SEQ ID NO: 23837 - protein, 11 aa, BK virus
SSLPRYPVLQG

SEQ ID NO: 23838 - protein, 11 aa, BK virus
SLPRYPVLQGM

SEQ ID NO: 23839 - protein, 11 aa, BK virus
LPRYPVLQGMA

SEQ ID NO: 23840 - protein, 11 aa, BK virus
PRYPVLQGMAY

SEQ ID NO: 23841 - protein, 11 aa, BK virus
RYPVLQGMAYL

SEQ ID NO: 23842 - protein, 11 aa, BK virus
YPVLQGMAYLF

SEQ ID NO: 23843 - protein, 11 aa, BK virus
PVLQGMAYLFQ

SEQ ID NO: 23844 - protein, 11 aa, BK virus
VLQGMAYLFQK

SEQ ID NO: 23845 - protein, 11 aa, BK virus
LQGMAYLFQKA

SEQ ID NO: 23846 - protein, 11 aa, BK virus
QGMAYLFQKAF

SEQ ID NO: 23847 - protein, 11 aa, BK virus
GMAYLFQKAFC

SEQ ID NO: 23848 - protein, 11 aa, BK virus
MAYLFQKAFCA

SEQ ID NO: 23849 - protein, 11 aa, BK virus
AYLFQKAFCAL

SEQ ID NO: 23850 - protein, 11 aa, BK virus
YLFQKAFCALP

SEQ ID NO: 23851 - protein, 11 aa, BK virus
LFQKAFCALPL

SEQ ID NO: 23852 - protein, 11 aa, BK virus
FQKAFCALPLH

SEQ ID NO: 23853 - protein, 11 aa, BK virus
QKAFCALPLHA

SEQ ID NO: 23854 - protein, 11 aa, BK virus
KAFCALPLHAM

SEQ ID NO: 23855 - protein, 11 aa, BK virus
AFCALPLHAMS

SEQ ID NO: 23856 - protein, 11 aa, BK virus
FCALPLHAMSA

SEQ ID NO: 23857 - protein, 11 aa, BK virus
KIFKKRALGLD

SEQ ID NO: 23858 - protein, 11 aa, BK virus
IFKKRALGLDR

SEQ ID NO: 23859 - protein, 11 aa, BK virus
FKKRALGLDRL

SEQ ID NO: 23860 - protein, 11 aa, BK virus
KKRALGLDRLL

SEQ ID NO: 23861 - protein, 11 aa, BK virus
KRALGLDRLLL

SEQ ID NO: 23862 - protein, 11 aa, BK virus
RALGLDRLLLH

SEQ ID NO: 23863 - protein, 11 aa, BK virus
LLHTVVWLRPN

SEQ ID NO: 23864 - protein, 11 aa, BK virus
RNSAMVGPNNW

SEQ ID NO: 23865 - protein, 11 aa, BK virus
NSAMVGPNNWR

SEQ ID NO: 23866 - protein, 11 aa, BK virus
SAMVGPNNWRN

SEQ ID NO: 23867 - protein, 11 aa, BK virus
AMVGPNNWRNS

SEQ ID NO: 23868 - protein, 11 aa, BK virus
MVGPNNWRNSL

SEQ ID NO: 23869 - protein, 11 aa, BK virus
VGPNNWRNSLQ

SEQ ID NO: 23870 - protein, 11 aa, BK virus
GPNNWRNSLQR

SEQ ID NO: 23871 - protein, 11 aa, BK virus
PNNWRNSLQRS

SEQ ID NO: 23872 - protein, 11 aa, BK virus
NNWRNSLQRSK

SEQ ID NO: 23873 - protein, 11 aa, BK virus
NWRNSLQRSKA

SEQ ID NO: 23874 - protein, 11 aa, BK virus
WRNSLQRSKAL

SEQ ID NO: 23875 - protein, 11 aa, BK virus
RNSLQRSKALR

SEQ ID NO: 23876 - protein, 11 aa, BK virus
VPTYGTEEWES

SEQ ID NO: 23877 - protein, 11 aa, BK virus
PTYGTEEWESW

SEQ ID NO: 23878 - protein, 11 aa, BK virus
TYGTEEWESWW

SEQ ID NO: 23879 - protein, 11 aa, BK virus
YGTEEWESWWS

SEQ ID NO: 23880 - protein, 11 aa, BK virus
GTEEWESWWSS

SEQ ID NO: 23881 - protein, 11 aa, BK virus
TEEWESWWSSF

SEQ ID NO: 23882 - protein, 11 aa, BK virus
EEWESWWSSFN

SEQ ID NO: 23883 - protein, 11 aa, BK virus
EWESWWSSFNE

SEQ ID NO: 23884 - protein, 11 aa, BK virus
WESWWSSFNEK

SEQ ID NO: 23885 - protein, 11 aa, BK virus
ESWWSSFNEKW

SEQ ID NO: 23886 - protein, 11 aa, BK virus
SWWSSFNEKWD

SEQ ID NO: 23887 - protein, 11 aa, BK virus
WWSSFNEKWDE

SEQ ID NO: 23888 - protein, 11 aa, BK virus
WSSFNEKWDED

SEQ ID NO: 23889 - protein, 11 aa, BK virus
SSFNEKWDEDL

SEQ ID NO: 23890 - protein, 11 aa, BK virus
SFNEKWDEDLF

SEQ ID NO: 23891 - protein, 11 aa, BK virus
FNEKWDEDLFC

SEQ ID NO: 23892 - protein, 11 aa, BK virus
NEKWDEDLFCH

SEQ ID NO: 23893 - protein, 11 aa, BK virus
EKWDEDLFCHE

SEQ ID NO: 23894 - protein, 11 aa, BK virus
KWDEDLFCHED

SEQ ID NO: 23895 - protein, 11 aa, BK virus
WDEDLFCHEDM

SEQ ID NO: 23896 - protein, 11 aa, BK virus
DEDLFCHEDMF

SEQ ID NO: 23897 - protein, 11 aa, BK virus
EDLFCHEDMFA

SEQ ID NO: 23898 - protein, 11 aa, BK virus
DLFCHEDMFAS

SEQ ID NO: 23899 - protein, 11 aa, BK virus
LFCHEDMFASD

SEQ ID NO: 23900 - protein, 11 aa, BK virus
FCHEDMFASDE

SEQ ID NO: 23901 - protein, 11 aa, BK virus
CHEDMFASDEE

SEQ ID NO: 23902 - protein, 11 aa, BK virus
HEDMFASDEEA

SEQ ID NO: 23903 - protein, 11 aa, BK virus
EDMFASDEEAT

SEQ ID NO: 23904 - protein, 11 aa, BK virus
DMFASDEEATA

SEQ ID NO: 23905 - protein, 11 aa, BK virus
MFASDEEATAD

SEQ ID NO: 23906 - protein, 11 aa, BK virus
FASDEEATADS

SEQ ID NO: 23907 - protein, 11 aa, BK virus
ASDEEATADSQ

SEQ ID NO: 23908 - protein, 11 aa, BK virus
SDEEATADSQH

SEQ ID NO: 23909 - protein, 11 aa, BK virus
DEEATADSQHS

SEQ ID NO: 23910 - protein, 11 aa, BK virus
EEATADSQHST

SEQ ID NO: 23911 - protein, 11 aa, BK virus
EATADSQHSTP

SEQ ID NO: 23912 - protein, 11 aa, BK virus
ATADSQHSTPP

SEQ ID NO: 23913 - protein, 11 aa, BK virus
TADSQHSTPPK

SEQ ID NO: 23914 - protein, 11 aa, BK virus
ADSQHSTPPKK

SEQ ID NO: 23915 - protein, 11 aa, BK virus
DSQHSTPPKKK

SEQ ID NO: 23916 - protein, 11 aa, BK virus
SQHSTPPKKKR

SEQ ID NO: 23917 - protein, 11 aa, BK virus
QHSTPPKKKRK

SEQ ID NO: 23918 - protein, 11 aa, BK virus
HSTPPKKKRKV

SEQ ID NO: 23919 - protein, 11 aa, BK virus
STPPKKKRKVE

SEQ ID NO: 23920 - protein, 11 aa, BK virus
TPPKKKRKVED

SEQ ID NO: 23921 - protein, 11 aa, BK virus
PPKKKRKVEDP

SEQ ID NO: 23922 - protein, 11 aa, BK virus
PKKKRKVEDPK

SEQ ID NO: 23923 - protein, 11 aa, BK virus
KKKRKVEDPKD

SEQ ID NO: 23924 - protein, 11 aa, BK virus
KKRKVEDPKDF

SEQ ID NO: 23925 - protein, 11 aa, BK virus
KRKVEDPKDFP

SEQ ID NO: 23926 - protein, 11 aa, BK virus
RKVEDPKDFPS

SEQ ID NO: 23927 - protein, 11 aa, BK virus
KVEDPKDFPSD

SEQ ID NO: 23928 - protein, 11 aa, BK virus
VEDPKDFPSDL

SEQ ID NO: 23929 - protein, 11 aa, BK virus
EDPKDFPSDLH

SEQ ID NO: 23930 - protein, 11 aa, BK virus
DPKDFPSDLHQ

SEQ ID NO: 23931 - protein, 11 aa, BK virus
PKDFPSDLHQF

SEQ ID NO: 23932 - protein, 11 aa, BK virus
KDFPSDLHQFL

SEQ ID NO: 23933 - protein, 11 aa, BK virus
DFPSDLHQFLS

SEQ ID NO: 23934 - protein, 11 aa, BK virus
FPSDLHQFLSQ

SEQ ID NO: 23935 - protein, 11 aa, BK virus
PSDLHQFLSQA

SEQ ID NO: 23936 - protein, 11 aa, BK virus
SDLHQFLSQAV

SEQ ID NO: 23937 - protein, 11 aa, BK virus
DLHQFLSQAVF

SEQ ID NO: 23938 - protein, 11 aa, BK virus
LHQFLSQAVFS

SEQ ID NO: 23939 - protein, 11 aa, BK virus
HQFLSQAVFSN

SEQ ID NO: 23940 - protein, 11 aa, BK virus
QFLSQAVFSNR

SEQ ID NO: 23941 - protein, 11 aa, BK virus
FLSQAVFSNRT

SEQ ID NO: 23942 - protein, 11 aa, BK virus
LSQAVFSNRTL

SEQ ID NO: 23943 - protein, 11 aa, BK virus
SQAVFSNRTLA

SEQ ID NO: 23944 - protein, 11 aa, BK virus
QAVFSNRTLAC

SEQ ID NO: 23945 - protein, 11 aa, BK virus
AVFSNRTLACF

SEQ ID NO: 23946 - protein, 11 aa, BK virus
VFSNRTLACFA

SEQ ID NO: 23947 - protein, 11 aa, BK virus
FSNRTLACFAV

SEQ ID NO: 23948 - protein, 11 aa, BK virus
SNRTLACFAVY

SEQ ID NO: 23949 - protein, 11 aa, BK virus
NRTLACFAVYT

SEQ ID NO: 23950 - protein, 11 aa, BK virus
RTLACFAVYTT

SEQ ID NO: 23951 - protein, 11 aa, BK virus
TLACFAVYTTK

SEQ ID NO: 23952 - protein, 11 aa, BK virus
LACFAVYTTKE

SEQ ID NO: 23953 - protein, 11 aa, BK virus
ACFAVYTTKEK

SEQ ID NO: 23954 - protein, 11 aa, BK virus
CFAVYTTKEKA

SEQ ID NO: 23955 - protein, 11 aa, BK virus
FAVYTTKEKAQ

SEQ ID NO: 23956 - protein, 11 aa, BK virus
AVYTTKEKAQI

SEQ ID NO: 23957 - protein, 11 aa, BK virus
VYTTKEKAQIL

SEQ ID NO: 23958 - protein, 11 aa, BK virus
YTTKEKAQILY

SEQ ID NO: 23959 - protein, 11 aa, BK virus
TTKEKAQILYK

SEQ ID NO: 23960 - protein, 11 aa, BK virus
TKEKAQILYKK

SEQ ID NO: 23961 - protein, 11 aa, BK virus
KEKAQILYKKL

SEQ ID NO: 23962 - protein, 11 aa, BK virus
EKAQILYKKLM

SEQ ID NO: 23963 - protein, 11 aa, BK virus
KAQILYKKLME

SEQ ID NO: 23964 - protein, 11 aa, BK virus
AQILYKKLMEK

SEQ ID NO: 23965 - protein, 11 aa, BK virus
QILYKKLMEKY

SEQ ID NO: 23966 - protein, 11 aa, BK virus
ILYKKLMEKYS

SEQ ID NO: 23967 - protein, 11 aa, BK virus
LYKKLMEKYSV

SEQ ID NO: 23968 - protein, 11 aa, BK virus
YKKLMEKYSVT

SEQ ID NO: 23969 - protein, 11 aa, BK virus
KKLMEKYSVTF

SEQ ID NO: 23970 - protein, 11 aa, BK virus
KLMEKYSVTFI

SEQ ID NO: 23971 - protein, 11 aa, BK virus
LMEKYSVTFIS

SEQ ID NO: 23972 - protein, 11 aa, BK virus
MEKYSVTFISR

SEQ ID NO: 23973 - protein, 11 aa, BK virus
EKYSVTFISRH

SEQ ID NO: 23974 - protein, 11 aa, BK virus
KYSVTFISRHM

SEQ ID NO: 23975 - protein, 11 aa, BK virus
YSVTFISRHMC

SEQ ID NO: 23976 - protein, 11 aa, BK virus
SVTFISRHMCA

SEQ ID NO: 23977 - protein, 11 aa, BK virus
VTFISRHMCAG

SEQ ID NO: 23978 - protein, 11 aa, BK virus
TFISRHMCAGH

SEQ ID NO: 23979 - protein, 11 aa, BK virus
FISRHMCAGHN

SEQ ID NO: 23980 - protein, 11 aa, BK virus
ISRHMCAGHNI

SEQ ID NO: 23981 - protein, 11 aa, BK virus
SRHMCAGHNII

SEQ ID NO: 23982 - protein, 11 aa, BK virus
RHMCAGHNIIF

SEQ ID NO: 23983 - protein, 11 aa, BK virus
HMCAGHNIIFF

SEQ ID NO: 23984 - protein, 11 aa, BK virus
MCAGHNIIFFL

SEQ ID NO: 23985 - protein, 11 aa, BK virus
CAGHNIIFFLT

SEQ ID NO: 23986 - protein, 11 aa, BK virus
AGHNIIFFLTP

SEQ ID NO: 23987 - protein, 11 aa, BK virus
GHNIIFFLTPH

SEQ ID NO: 23988 - protein, 11 aa, BK virus
HNIIFFLTPHR

SEQ ID NO: 23989 - protein, 11 aa, BK virus
NIIFFLTPHRH

SEQ ID NO: 23990 - protein, 11 aa, BK virus
IIFFLTPHRHR

SEQ ID NO: 23991 - protein, 11 aa, BK virus
IFFLTPHRHRV

SEQ ID NO: 23992 - protein, 11 aa, BK virus
FFLTPHRHRVS

SEQ ID NO: 23993 - protein, 11 aa, BK virus
FLTPHRHRVSA

SEQ ID NO: 23994 - protein, 11 aa, BK virus
LTPHRHRVSAI

SEQ ID NO: 23995 - protein, 11 aa, BK virus
TPHRHRVSAIN

SEQ ID NO: 23996 - protein, 11 aa, BK virus
PHRHRVSAINN

SEQ ID NO: 23997 - protein, 11 aa, BK virus
HRHRVSAINNF

SEQ ID NO: 23998 - protein, 11 aa, BK virus
RHRVSAINNFC

SEQ ID NO: 23999 - protein, 11 aa, BK virus
HRVSAINNFCQ

SEQ ID NO: 24000 - protein, 11 aa, BK virus
RVSAINNFCQK

SEQ ID NO: 24001 - protein, 11 aa, BK virus
VSAINNFCQKL

SEQ ID NO: 24002 - protein, 11 aa, BK virus
SAINNFCQKLC

SEQ ID NO: 24003 - protein, 11 aa, BK virus
AINNFCQKLCT

SEQ ID NO: 24004 - protein, 11 aa, BK virus
INNFCQKLCTF

SEQ ID NO: 24005 - protein, 11 aa, BK virus
NNFCQKLCTFS

SEQ ID NO: 24006 - protein, 11 aa, BK virus
NFCQKLCTFSF

SEQ ID NO: 24007 - protein, 11 aa, BK virus
FCQKLCTFSFL

SEQ ID NO: 24008 - protein, 11 aa, BK virus
CQKLCTFSFLI

SEQ ID NO: 24009 - protein, 11 aa, BK virus
QKLCTFSFLIC

SEQ ID NO: 24010 - protein, 11 aa, BK virus
KLCTFSFLICK

SEQ ID NO: 24011 - protein, 11 aa, BK virus
LCTFSFLICKG

SEQ ID NO: 24012 - protein, 11 aa, BK virus
CTFSFLICKGV

SEQ ID NO: 24013 - protein, 11 aa, BK virus
TFSFLICKGVN

SEQ ID NO: 24014 - protein, 11 aa, BK virus
FSFLICKGVNK

SEQ ID NO: 24015 - protein, 11 aa, BK virus
SFLICKGVNKE

SEQ ID NO: 24016 - protein, 11 aa, BK virus
FLICKGVNKEY

SEQ ID NO: 24017 - protein, 11 aa, BK virus
LICKGVNKEYL

SEQ ID NO: 24018 - protein, 11 aa, BK virus
ICKGVNKEYLL

SEQ ID NO: 24019 - protein, 11 aa, BK virus
CKGVNKEYLLY

SEQ ID NO: 24020 - protein, 11 aa, BK virus
KGVNKEYLLYS

SEQ ID NO: 24021 - protein, 11 aa, BK virus
GVNKEYLLYSA

SEQ ID NO: 24022 - protein, 11 aa, BK virus
VNKEYLLYSAL

SEQ ID NO: 24023 - protein, 11 aa, BK virus
NKEYLLYSALT

SEQ ID NO: 24024 - protein, 11 aa, BK virus
KEYLLYSALTR

SEQ ID NO: 24025 - protein, 11 aa, BK virus
EYLLYSALTRD

SEQ ID NO: 24026 - protein, 11 aa, BK virus
YLLYSALTRDP

SEQ ID NO: 24027 - protein, 11 aa, BK virus
LLYSALTRDPY

SEQ ID NO: 24028 - protein, 11 aa, BK virus
LYSALTRDPYH

SEQ ID NO: 24029 - protein, 11 aa, BK virus
YSALTRDPYHT

SEQ ID NO: 24030 - protein, 11 aa, BK virus
SALTRDPYHTI

SEQ ID NO: 24031 - protein, 11 aa, BK virus
ALTRDPYHTIE

SEQ ID NO: 24032 - protein, 11 aa, BK virus
LTRDPYHTIEE

SEQ ID NO: 24033 - protein, 11 aa, BK virus
TRDPYHTIEES

SEQ ID NO: 24034 - protein, 11 aa, BK virus
RDPYHTIEESI

SEQ ID NO: 24035 - protein, 11 aa, BK virus
DPYHTIEESIQ

SEQ ID NO: 24036 - protein, 11 aa, BK virus
PYHTIEESIQG

SEQ ID NO: 24037 - protein, 11 aa, BK virus
YHTIEESIQGG

SEQ ID NO: 24038 - protein, 11 aa, BK virus
HTIEESIQGGL

SEQ ID NO: 24039 - protein, 11 aa, BK virus
TIEESIQGGLK

SEQ ID NO: 24040 - protein, 11 aa, BK virus
IEESIQGGLKE

SEQ ID NO: 24041 - protein, 11 aa, BK virus
EESIQGGLKEH

SEQ ID NO: 24042 - protein, 11 aa, BK virus
ESIQGGLKEHD

SEQ ID NO: 24043 - protein, 11 aa, BK virus
SIQGGLKEHDF

SEQ ID NO: 24044 - protein, 11 aa, BK virus
IQGGLKEHDFS

SEQ ID NO: 24045 - protein, 11 aa, BK virus
QGGLKEHDFSP

SEQ ID NO: 24046 - protein, 11 aa, BK virus
GGLKEHDFSPE

SEQ ID NO: 24047 - protein, 11 aa, BK virus
GLKEHDFSPEE

SEQ ID NO: 24048 - protein, 11 aa, BK virus
LKEHDFSPEEP

SEQ ID NO: 24049 - protein, 11 aa, BK virus
KEHDFSPEEPE

SEQ ID NO: 24050 - protein, 11 aa, BK virus
EHDFSPEEPEE

SEQ ID NO: 24051 - protein, 11 aa, BK virus
HDFSPEEPEET

SEQ ID NO: 24052 - protein, 11 aa, BK virus
DFSPEEPEETK

SEQ ID NO: 24053 - protein, 11 aa, BK virus
FSPEEPEETKQ

SEQ ID NO: 24054 - protein, 11 aa, BK virus
SPEEPEETKQV

SEQ ID NO: 24055 - protein, 11 aa, BK virus
PEEPEETKQVS

SEQ ID NO: 24056 - protein, 11 aa, BK virus
EEPEETKQVSW

SEQ ID NO: 24057 - protein, 11 aa, BK virus
EPEETKQVSWK

SEQ ID NO: 24058 - protein, 11 aa, BK virus
PEETKQVSWKL

SEQ ID NO: 24059 - protein, 11 aa, BK virus
EETKQVSWKLI

SEQ ID NO: 24060 - protein, 11 aa, BK virus
ETKQVSWKLIT

SEQ ID NO: 24061 - protein, 11 aa, BK virus
TKQVSWKLITE

SEQ ID NO: 24062 - protein, 11 aa, BK virus
KQVSWKLITEY

SEQ ID NO: 24063 - protein, 11 aa, BK virus
QVSWKLITEYA

SEQ ID NO: 24064 - protein, 11 aa, BK virus
VSWKLITEYAV

SEQ ID NO: 24065 - protein, 11 aa, BK virus
SWKLITEYAVE

SEQ ID NO: 24066 - protein, 11 aa, BK virus
WKLITEYAVET

SEQ ID NO: 24067 - protein, 11 aa, BK virus
KLITEYAVETK

SEQ ID NO: 24068 - protein, 11 aa, BK virus
LITEYAVETKC

SEQ ID NO: 24069 - protein, 11 aa, BK virus
ITEYAVETKCE

SEQ ID NO: 24070 - protein, 11 aa, BK virus
TEYAVETKCED

SEQ ID NO: 24071 - protein, 11 aa, BK virus
EYAVETKCEDV

SEQ ID NO: 24072 - protein, 11 aa, BK virus
YAVETKCEDVF

SEQ ID NO: 24073 - protein, 11 aa, BK virus
AVETKCEDVFL

SEQ ID NO: 24074 - protein, 11 aa, BK virus
VETKCEDVFLL

SEQ ID NO: 24075 - protein, 11 aa, BK virus
ETKCEDVFLLL

SEQ ID NO: 24076 - protein, 11 aa, BK virus
TKCEDVFLLLG

SEQ ID NO: 24077 - protein, 11 aa, BK virus
KCEDVFLLLGM

SEQ ID NO: 24078 - protein, 11 aa, BK virus
CEDVFLLLGMY

SEQ ID NO: 24079 - protein, 11 aa, BK virus
EDVFLLLGMYL

SEQ ID NO: 24080 - protein, 11 aa, BK virus
DVFLLLGMYLE

SEQ ID NO: 24081 - protein, 11 aa, BK virus
VFLLLGMYLEF

SEQ ID NO: 24082 - protein, 11 aa, BK virus
FLLLGMYLEFQ

SEQ ID NO: 24083 - protein, 11 aa, BK virus
LLLGMYLEFQY

SEQ ID NO: 24084 - protein, 11 aa, BK virus
LLGMYLEFQYN

SEQ ID NO: 24085 - protein, 11 aa, BK virus
LGMYLEFQYNV

SEQ ID NO: 24086 - protein, 11 aa, BK virus
GMYLEFQYNVE

SEQ ID NO: 24087 - protein, 11 aa, BK virus
MYLEFQYNVEE

SEQ ID NO: 24088 - protein, 11 aa, BK virus
YLEFQYNVEEC

SEQ ID NO: 24089 - protein, 11 aa, BK virus
LEFQYNVEECK

SEQ ID NO: 24090 - protein, 11 aa, BK virus
EFQYNVEECKK

SEQ ID NO: 24091 - protein, 11 aa, BK virus
FQYNVEECKKC

SEQ ID NO: 24092 - protein, 11 aa, BK virus
QYNVEECKKCQ

SEQ ID NO: 24093 - protein, 11 aa, BK virus
YNVEECKKCQK

SEQ ID NO: 24094 - protein, 11 aa, BK virus
NVEECKKCQKK

SEQ ID NO: 24095 - protein, 11 aa, BK virus
VEECKKCQKKD

SEQ ID NO: 24096 - protein, 11 aa, BK virus
EECKKCQKKDQ

SEQ ID NO: 24097 - protein, 11 aa, BK virus
ECKKCQKKDQP

SEQ ID NO: 24098 - protein, 11 aa, BK virus
CKKCQKKDQPY

SEQ ID NO: 24099 - protein, 11 aa, BK virus
KKCQKKDQPYH

SEQ ID NO: 24100 - protein, 11 aa, BK virus
KCQKKDQPYHF

SEQ ID NO: 24101 - protein, 11 aa, BK virus
CQKKDQPYHFK

SEQ ID NO: 24102 - protein, 11 aa, BK virus
QKKDQPYHFKY

SEQ ID NO: 24103 - protein, 11 aa, BK virus
KKDQPYHFKYH

SEQ ID NO: 24104 - protein, 11 aa, BK virus
KDQPYHFKYHE

SEQ ID NO: 24105 - protein, 11 aa, BK virus
DQPYHFKYHEK

SEQ ID NO: 24106 - protein, 11 aa, BK virus
QPYHFKYHEKH

SEQ ID NO: 24107 - protein, 11 aa, BK virus
PYHFKYHEKHF

SEQ ID NO: 24108 - protein, 11 aa, BK virus
YHFKYHEKHFA

SEQ ID NO: 24109 - protein, 11 aa, BK virus
HFKYHEKHFAN

SEQ ID NO: 24110 - protein, 11 aa, BK virus
FKYHEKHFANA

SEQ ID NO: 24111 - protein, 11 aa, BK virus
KYHEKHFANAI

SEQ ID NO: 24112 - protein, 11 aa, BK virus
YHEKHFANAII

SEQ ID NO: 24113 - protein, 11 aa, BK virus
HEKHFANAIIF

SEQ ID NO: 24114 - protein, 11 aa, BK virus
EKHFANAIIFA

SEQ ID NO: 24115 - protein, 11 aa, BK virus
KHFANAIIFAE

SEQ ID NO: 24116 - protein, 11 aa, BK virus
HFANAIIFAES

SEQ ID NO: 24117 - protein, 11 aa, BK virus
FANAIIFAESK

SEQ ID NO: 24118 - protein, 11 aa, BK virus
ANAIIFAESKN

SEQ ID NO: 24119 - protein, 11 aa, BK virus
NAIIFAESKNQ

SEQ ID NO: 24120 - protein, 11 aa, BK virus
AIIFAESKNQK

SEQ ID NO: 24121 - protein, 11 aa, BK virus
IIFAESKNQKS

SEQ ID NO: 24122 - protein, 11 aa, BK virus
IFAESKNQKSI

SEQ ID NO: 24123 - protein, 11 aa, BK virus
FAESKNQKSIC

SEQ ID NO: 24124 - protein, 11 aa, BK virus
AESKNQKSICQ

SEQ ID NO: 24125 - protein, 11 aa, BK virus
ESKNQKSICQQ

SEQ ID NO: 24126 - protein, 11 aa, BK virus
SKNQKSICQQA

SEQ ID NO: 24127 - protein, 11 aa, BK virus
KNQKSICQQAV

SEQ ID NO: 24128 - protein, 11 aa, BK virus
NQKSICQQAVD

SEQ ID NO: 24129 - protein, 11 aa, BK virus
QKSICQQAVDT

SEQ ID NO: 24130 - protein, 11 aa, BK virus
KSICQQAVDTV

SEQ ID NO: 24131 - protein, 11 aa, BK virus
SICQQAVDTVL

SEQ ID NO: 24132 - protein, 11 aa, BK virus
ICQQAVDTVLA

SEQ ID NO: 24133 - protein, 11 aa, BK virus
CQQAVDTVLAK

SEQ ID NO: 24134 - protein, 11 aa, BK virus
QQAVDTVLAKK

SEQ ID NO: 24135 - protein, 11 aa, BK virus
QAVDTVLAKKR

SEQ ID NO: 24136 - protein, 11 aa, BK virus
AVDTVLAKKRV

SEQ ID NO: 24137 - protein, 11 aa, BK virus
VDTVLAKKRVD

SEQ ID NO: 24138 - protein, 11 aa, BK virus
DTVLAKKRVDT

SEQ ID NO: 24139 - protein, 11 aa, BK virus
TVLAKKRVDTL

SEQ ID NO: 24140 - protein, 11 aa, BK virus
VLAKKRVDTLH

SEQ ID NO: 24141 - protein, 11 aa, BK virus
LAKKRVDTLHM

SEQ ID NO: 24142 - protein, 11 aa, BK virus
AKKRVDTLHMT

SEQ ID NO: 24143 - protein, 11 aa, BK virus
KKRVDTLHMTR

SEQ ID NO: 24144 - protein, 11 aa, BK virus
KRVDTLHMTRE

SEQ ID NO: 24145 - protein, 11 aa, BK virus
RVDTLHMTREE

SEQ ID NO: 24146 - protein, 11 aa, BK virus
VDTLHMTREEM

SEQ ID NO: 24147 - protein, 11 aa, BK virus
DTLHMTREEML

SEQ ID NO: 24148 - protein, 11 aa, BK virus
TLHMTREEMLT

SEQ ID NO: 24149 - protein, 11 aa, BK virus
LHMTREEMLTE

SEQ ID NO: 24150 - protein, 11 aa, BK virus
HMTREEMLTER

SEQ ID NO: 24151 - protein, 11 aa, BK virus
MTREEMLTERF

SEQ ID NO: 24152 - protein, 11 aa, BK virus
TREEMLTERFN

SEQ ID NO: 24153 - protein, 11 aa, BK virus
REEMLTERFNH

SEQ ID NO: 24154 - protein, 11 aa, BK virus
EEMLTERFNHI

SEQ ID NO: 24155 - protein, 11 aa, BK virus
EMLTERFNHIL

SEQ ID NO: 24156 - protein, 11 aa, BK virus
MLTERFNHILD

SEQ ID NO: 24157 - protein, 11 aa, BK virus
LTERFNHILDK

SEQ ID NO: 24158 - protein, 11 aa, BK virus
TERFNHILDKM

SEQ ID NO: 24159 - protein, 11 aa, BK virus
ERFNHILDKMD

SEQ ID NO: 24160 - protein, 11 aa, BK virus
RFNHILDKMDL

SEQ ID NO: 24161 - protein, 11 aa, BK virus
FNHILDKMDLI

SEQ ID NO: 24162 - protein, 11 aa, BK virus
NHILDKMDLIF

SEQ ID NO: 24163 - protein, 11 aa, BK virus
HILDKMDLIFG

SEQ ID NO: 24164 - protein, 11 aa, BK virus
ILDKMDLIFGA

SEQ ID NO: 24165 - protein, 11 aa, BK virus
LDKMDLIFGAH

SEQ ID NO: 24166 - protein, 11 aa, BK virus
DKMDLIFGAHG

SEQ ID NO: 24167 - protein, 11 aa, BK virus
KMDLIFGAHGN

SEQ ID NO: 24168 - protein, 11 aa, BK virus
MDLIFGAHGNA

SEQ ID NO: 24169 - protein, 11 aa, BK virus
DLIFGAHGNAV

SEQ ID NO: 24170 - protein, 11 aa, BK virus
LIFGAHGNAVL

SEQ ID NO: 24171 - protein, 11 aa, BK virus
IFGAHGNAVLE

SEQ ID NO: 24172 - protein, 11 aa, BK virus
FGAHGNAVLEQ

SEQ ID NO: 24173 - protein, 11 aa, BK virus
GAHGNAVLEQY

SEQ ID NO: 24174 - protein, 11 aa, BK virus
AHGNAVLEQYM

SEQ ID NO: 24175 - protein, 11 aa, BK virus
HGNAVLEQYMA

SEQ ID NO: 24176 - protein, 11 aa, BK virus
GNAVLEQYMAG

SEQ ID NO: 24177 - protein, 11 aa, BK virus
NAVLEQYMAGV

SEQ ID NO: 24178 - protein, 11 aa, BK virus
AVLEQYMAGVA

SEQ ID NO: 24179 - protein, 11 aa, BK virus
VLEQYMAGVAW

SEQ ID NO: 24180 - protein, 11 aa, BK virus
LEQYMAGVAWL

SEQ ID NO: 24181 - protein, 11 aa, BK virus
EQYMAGVAWLH

SEQ ID NO: 24182 - protein, 11 aa, BK virus
QYMAGVAWLHC

SEQ ID NO: 24183 - protein, 11 aa, BK virus
YMAGVAWLHCL

SEQ ID NO: 24184 - protein, 11 aa, BK virus
MAGVAWLHCLL

SEQ ID NO: 24185 - protein, 11 aa, BK virus
AGVAWLHCLLP

SEQ ID NO: 24186 - protein, 11 aa, BK virus
GVAWLHCLLPK

SEQ ID NO: 24187 - protein, 11 aa, BK virus
VAWLHCLLPKM

SEQ ID NO: 24188 - protein, 11 aa, BK virus
AWLHCLLPKMD

SEQ ID NO: 24189 - protein, 11 aa, BK virus
WLHCLLPKMDS

SEQ ID NO: 24190 - protein, 11 aa, BK virus
LHCLLPKMDSV

SEQ ID NO: 24191 - protein, 11 aa, BK virus
HCLLPKMDSVI

SEQ ID NO: 24192 - protein, 11 aa, BK virus
CLLPKMDSVIF

SEQ ID NO: 24193 - protein, 11 aa, BK virus
LLPKMDSVIFD

SEQ ID NO: 24194 - protein, 11 aa, BK virus
LPKMDSVIFDF

SEQ ID NO: 24195 - protein, 11 aa, BK virus
PKMDSVIFDFL

SEQ ID NO: 24196 - protein, 11 aa, BK virus
KMDSVIFDFLH

SEQ ID NO: 24197 - protein, 11 aa, BK virus
MDSVIFDFLHC

SEQ ID NO: 24198 - protein, 11 aa, BK virus
DSVIFDFLHCI

SEQ ID NO: 24199 - protein, 11 aa, BK virus
SVIFDFLHCIV

SEQ ID NO: 24200 - protein, 11 aa, BK virus
VIFDFLHCIVF

SEQ ID NO: 24201 - protein, 11 aa, BK virus
IFDFLHCIVFN

SEQ ID NO: 24202 - protein, 11 aa, BK virus
FDFLHCIVFNV

SEQ ID NO: 24203 - protein, 11 aa, BK virus
DFLHCIVFNVP

SEQ ID NO: 24204 - protein, 11 aa, BK virus
FLHCIVFNVPK

SEQ ID NO: 24205 - protein, 11 aa, BK virus
LHCIVFNVPKR

SEQ ID NO: 24206 - protein, 11 aa, BK virus
HCIVFNVPKRR

SEQ ID NO: 24207 - protein, 11 aa, BK virus
CIVFNVPKRRY

SEQ ID NO: 24208 - protein, 11 aa, BK virus
IVFNVPKRRYW

SEQ ID NO: 24209 - protein, 11 aa, BK virus
VFNVPKRRYWL

SEQ ID NO: 24210 - protein, 11 aa, BK virus
FNVPKRRYWLF

SEQ ID NO: 24211 - protein, 11 aa, BK virus
NVPKRRYWLFK

SEQ ID NO: 24212 - protein, 11 aa, BK virus
VPKRRYWLFKG

SEQ ID NO: 24213 - protein, 11 aa, BK virus
PKRRYWLFKGP

SEQ ID NO: 24214 - protein, 11 aa, BK virus
KRRYWLFKGPI

SEQ ID NO: 24215 - protein, 11 aa, BK virus
RRYWLFKGPID

SEQ ID NO: 24216 - protein, 11 aa, BK virus
RYWLFKGPIDS

SEQ ID NO: 24217 - protein, 11 aa, BK virus
YWLFKGPIDSG

SEQ ID NO: 24218 - protein, 11 aa, BK virus
WLFKGPIDSGK

SEQ ID NO: 24219 - protein, 11 aa, BK virus
LFKGPIDSGKT

SEQ ID NO: 24220 - protein, 11 aa, BK virus
FKGPIDSGKTT

SEQ ID NO: 24221 - protein, 11 aa, BK virus
KGPIDSGKTTL

SEQ ID NO: 24222 - protein, 11 aa, BK virus
GPIDSGKTTLA

SEQ ID NO: 24223 - protein, 11 aa, BK virus
PIDSGKTTLAA

SEQ ID NO: 24224 - protein, 11 aa, BK virus
IDSGKTTLAAG

SEQ ID NO: 24225 - protein, 11 aa, BK virus
DSGKTTLAAGL

SEQ ID NO: 24226 - protein, 11 aa, BK virus
SGKTTLAAGLL

SEQ ID NO: 24227 - protein, 11 aa, BK virus
GKTTLAAGLLD

SEQ ID NO: 24228 - protein, 11 aa, BK virus
KTTLAAGLLDL

SEQ ID NO: 24229 - protein, 11 aa, BK virus
TTLAAGLLDLC

SEQ ID NO: 24230 - protein, 11 aa, BK virus
TLAAGLLDLCG

SEQ ID NO: 24231 - protein, 11 aa, BK virus
LAAGLLDLCGG

SEQ ID NO: 24232 - protein, 11 aa, BK virus
AAGLLDLCGGK

SEQ ID NO: 24233 - protein, 11 aa, BK virus
AGLLDLCGGKA

SEQ ID NO: 24234 - protein, 11 aa, BK virus
GLLDLCGGKAL

SEQ ID NO: 24235 - protein, 11 aa, BK virus
LLDLCGGKALN

SEQ ID NO: 24236 - protein, 11 aa, BK virus
LDLCGGKALNV

SEQ ID NO: 24237 - protein, 11 aa, BK virus
DLCGGKALNVN

SEQ ID NO: 24238 - protein, 11 aa, BK virus
LCGGKALNVNL

SEQ ID NO: 24239 - protein, 11 aa, BK virus
CGGKALNVNLP

SEQ ID NO: 24240 - protein, 11 aa, BK virus
GGKALNVNLPM

SEQ ID NO: 24241 - protein, 11 aa, BK virus
GKALNVNLPME

SEQ ID NO: 24242 - protein, 11 aa, BK virus
KALNVNLPMER

SEQ ID NO: 24243 - protein, 11 aa, BK virus
ALNVNLPMERL

SEQ ID NO: 24244 - protein, 11 aa, BK virus
LNVNLPMERLT

SEQ ID NO: 24245 - protein, 11 aa, BK virus
NVNLPMERLTF

SEQ ID NO: 24246 - protein, 11 aa, BK virus
VNLPMERLTFE

SEQ ID NO: 24247 - protein, 11 aa, BK virus
NLPMERLTFEL

SEQ ID NO: 24248 - protein, 11 aa, BK virus
LPMERLTFELG

SEQ ID NO: 24249 - protein, 11 aa, BK virus
PMERLTFELGV

SEQ ID NO: 24250 - protein, 11 aa, BK virus
MERLTFELGVA

SEQ ID NO: 24251 - protein, 11 aa, BK virus
ERLTFELGVAI

SEQ ID NO: 24252 - protein, 11 aa, BK virus
RLTFELGVAID

SEQ ID NO: 24253 - protein, 11 aa, BK virus
LTFELGVAIDQ

SEQ ID NO: 24254 - protein, 11 aa, BK virus
TFELGVAIDQY

SEQ ID NO: 24255 - protein, 11 aa, BK virus
FELGVAIDQYM

SEQ ID NO: 24256 - protein, 11 aa, BK virus
ELGVAIDQYMV

SEQ ID NO: 24257 - protein, 11 aa, BK virus
LGVAIDQYMVV

SEQ ID NO: 24258 - protein, 11 aa, BK virus
GVAIDQYMVVF

SEQ ID NO: 24259 - protein, 11 aa, BK virus
VAIDQYMVVFE

SEQ ID NO: 24260 - protein, 11 aa, BK virus
AIDQYMVVFED

SEQ ID NO: 24261 - protein, 11 aa, BK virus
IDQYMVVFEDV

SEQ ID NO: 24262 - protein, 11 aa, BK virus
DQYMVVFEDVK

SEQ ID NO: 24263 - protein, 11 aa, BK virus
QYMVVFEDVKG

SEQ ID NO: 24264 - protein, 11 aa, BK virus
YMVVFEDVKGT

SEQ ID NO: 24265 - protein, 11 aa, BK virus
MVVFEDVKGTG

SEQ ID NO: 24266 - protein, 11 aa, BK virus
VVFEDVKGTGA

SEQ ID NO: 24267 - protein, 11 aa, BK virus
VFEDVKGTGAE

SEQ ID NO: 24268 - protein, 11 aa, BK virus
FEDVKGTGAES

SEQ ID NO: 24269 - protein, 11 aa, BK virus
EDVKGTGAESK

SEQ ID NO: 24270 - protein, 11 aa, BK virus
DVKGTGAESKD

SEQ ID NO: 24271 - protein, 11 aa, BK virus
VKGTGAESKDL

SEQ ID NO: 24272 - protein, 11 aa, BK virus
KGTGAESKDLP

SEQ ID NO: 24273 - protein, 11 aa, BK virus
GTGAESKDLPS

SEQ ID NO: 24274 - protein, 11 aa, BK virus
TGAESKDLPSG

SEQ ID NO: 24275 - protein, 11 aa, BK virus
GAESKDLPSGH

SEQ ID NO: 24276 - protein, 11 aa, BK virus
AESKDLPSGHG

SEQ ID NO: 24277 - protein, 11 aa, BK virus
ESKDLPSGHGI

SEQ ID NO: 24278 - protein, 11 aa, BK virus
SKDLPSGHGIN

SEQ ID NO: 24279 - protein, 11 aa, BK virus
KDLPSGHGINN

SEQ ID NO: 24280 - protein, 11 aa, BK virus
DLPSGHGINNL

SEQ ID NO: 24281 - protein, 11 aa, BK virus
LPSGHGINNLD

SEQ ID NO: 24282 - protein, 11 aa, BK virus
PSGHGINNLDS

SEQ ID NO: 24283 - protein, 11 aa, BK virus
SGHGINNLDSL

SEQ ID NO: 24284 - protein, 11 aa, BK virus
GHGINNLDSLR

SEQ ID NO: 24285 - protein, 11 aa, BK virus
HGINNLDSLRD

SEQ ID NO: 24286 - protein, 11 aa, BK virus
GINNLDSLRDY

SEQ ID NO: 24287 - protein, 11 aa, BK virus
INNLDSLRDYL

SEQ ID NO: 24288 - protein, 11 aa, BK virus
NNLDSLRDYLD

SEQ ID NO: 24289 - protein, 11 aa, BK virus
NLDSLRDYLDG

SEQ ID NO: 24290 - protein, 11 aa, BK virus
LDSLRDYLDGS

SEQ ID NO: 24291 - protein, 11 aa, BK virus
DSLRDYLDGSV

SEQ ID NO: 24292 - protein, 11 aa, BK virus
SLRDYLDGSVK

SEQ ID NO: 24293 - protein, 11 aa, BK virus
LRDYLDGSVKV

SEQ ID NO: 24294 - protein, 11 aa, BK virus
RDYLDGSVKVN

SEQ ID NO: 24295 - protein, 11 aa, BK virus
DYLDGSVKVNL

SEQ ID NO: 24296 - protein, 11 aa, BK virus
YLDGSVKVNLE

SEQ ID NO: 24297 - protein, 11 aa, BK virus
LDGSVKVNLEK

SEQ ID NO: 24298 - protein, 11 aa, BK virus
DGSVKVNLEKK

SEQ ID NO: 24299 - protein, 11 aa, BK virus
GSVKVNLEKKH

SEQ ID NO: 24300 - protein, 11 aa, BK virus
SVKVNLEKKHL

SEQ ID NO: 24301 - protein, 11 aa, BK virus
VKVNLEKKHLN

SEQ ID NO: 24302 - protein, 11 aa, BK virus
KVNLEKKHLNK

SEQ ID NO: 24303 - protein, 11 aa, BK virus
VNLEKKHLNKR

SEQ ID NO: 24304 - protein, 11 aa, BK virus
NLEKKHLNKRT

SEQ ID NO: 24305 - protein, 11 aa, BK virus
LEKKHLNKRTQ

SEQ ID NO: 24306 - protein, 11 aa, BK virus
EKKHLNKRTQI

SEQ ID NO: 24307 - protein, 11 aa, BK virus
KKHLNKRTQIF

SEQ ID NO: 24308 - protein, 11 aa, BK virus
KHLNKRTQIFP

SEQ ID NO: 24309 - protein, 11 aa, BK virus
HLNKRTQIFPP

SEQ ID NO: 24310 - protein, 11 aa, BK virus
LNKRTQIFPPG

SEQ ID NO: 24311 - protein, 11 aa, BK virus
NKRTQIFPPGL

SEQ ID NO: 24312 - protein, 11 aa, BK virus
KRTQIFPPGLV

SEQ ID NO: 24313 - protein, 11 aa, BK virus
RTQIFPPGLVT

SEQ ID NO: 24314 - protein, 11 aa, BK virus
TQIFPPGLVTM

SEQ ID NO: 24315 - protein, 11 aa, BK virus
QIFPPGLVTMN

SEQ ID NO: 24316 - protein, 11 aa, BK virus
IFPPGLVTMNE

SEQ ID NO: 24317 - protein, 11 aa, BK virus
FPPGLVTMNEY

SEQ ID NO: 24318 - protein, 11 aa, BK virus
PPGLVTMNEYP

SEQ ID NO: 24319 - protein, 11 aa, BK virus
PGLVTMNEYPV

SEQ ID NO: 24320 - protein, 11 aa, BK virus
GLVTMNEYPVP

SEQ ID NO: 24321 - protein, 11 aa, BK virus
LVTMNEYPVPK

SEQ ID NO: 24322 - protein, 11 aa, BK virus
VTMNEYPVPKT

SEQ ID NO: 24323 - protein, 11 aa, BK virus
TMNEYPVPKTL

SEQ ID NO: 24324 - protein, 11 aa, BK virus
MNEYPVPKTLQ

SEQ ID NO: 24325 - protein, 11 aa, BK virus
NEYPVPKTLQA

SEQ ID NO: 24326 - protein, 11 aa, BK virus
EYPVPKTLQAR

SEQ ID NO: 24327 - protein, 11 aa, BK virus
YPVPKTLQARF

SEQ ID NO: 24328 - protein, 11 aa, BK virus
PVPKTLQARFV

SEQ ID NO: 24329 - protein, 11 aa, BK virus
VPKTLQARFVR

SEQ ID NO: 24330 - protein, 11 aa, BK virus
PKTLQARFVRQ

SEQ ID NO: 24331 - protein, 11 aa, BK virus
KTLQARFVRQI

SEQ ID NO: 24332 - protein, 11 aa, BK virus
TLQARFVRQID

SEQ ID NO: 24333 - protein, 11 aa, BK virus
LQARFVRQIDF

SEQ ID NO: 24334 - protein, 11 aa, BK virus
QARFVRQIDFR

SEQ ID NO: 24335 - protein, 11 aa, BK virus
ARFVRQIDFRP

SEQ ID NO: 24336 - protein, 11 aa, BK virus
RFVRQIDFRPK

SEQ ID NO: 24337 - protein, 11 aa, BK virus
FVRQIDFRPKI

SEQ ID NO: 24338 - protein, 11 aa, BK virus
VRQIDFRPKIY

SEQ ID NO: 24339 - protein, 11 aa, BK virus
RQIDFRPKIYL

SEQ ID NO: 24340 - protein, 11 aa, BK virus
QIDFRPKIYLR

SEQ ID NO: 24341 - protein, 11 aa, BK virus
IDFRPKIYLRK

SEQ ID NO: 24342 - protein, 11 aa, BK virus
DFRPKIYLRKS

SEQ ID NO: 24343 - protein, 11 aa, BK virus
FRPKIYLRKSL

SEQ ID NO: 24344 - protein, 11 aa, BK virus
RPKIYLRKSLQ

SEQ ID NO: 24345 - protein, 11 aa, BK virus
PKIYLRKSLQN

SEQ ID NO: 24346 - protein, 11 aa, BK virus
KIYLRKSLQNS

SEQ ID NO: 24347 - protein, 11 aa, BK virus
IYLRKSLQNSE

SEQ ID NO: 24348 - protein, 11 aa, BK virus
YLRKSLQNSEF

SEQ ID NO: 24349 - protein, 11 aa, BK virus
LRKSLQNSEFL

SEQ ID NO: 24350 - protein, 11 aa, BK virus
RKSLQNSEFLL

SEQ ID NO: 24351 - protein, 11 aa, BK virus
KSLQNSEFLLE

SEQ ID NO: 24352 - protein, 11 aa, BK virus
SLQNSEFLLEK

SEQ ID NO: 24353 - protein, 11 aa, BK virus
LQNSEFLLEKR

SEQ ID NO: 24354 - protein, 11 aa, BK virus
QNSEFLLEKRI

SEQ ID NO: 24355 - protein, 11 aa, BK virus
NSEFLLEKRIL

SEQ ID NO: 24356 - protein, 11 aa, BK virus
SEFLLEKRILQ

SEQ ID NO: 24357 - protein, 11 aa, BK virus
EFLLEKRILQS

SEQ ID NO: 24358 - protein, 11 aa, BK virus
FLLEKRILQSG

SEQ ID NO: 24359 - protein, 11 aa, BK virus
LLEKRILQSGM

SEQ ID NO: 24360 - protein, 11 aa, BK virus
LEKRILQSGMT

SEQ ID NO: 24361 - protein, 11 aa, BK virus
EKRILQSGMTL

SEQ ID NO: 24362 - protein, 11 aa, BK virus
KRILQSGMTLL

SEQ ID NO: 24363 - protein, 11 aa, BK virus
RILQSGMTLLL

SEQ ID NO: 24364 - protein, 11 aa, BK virus
ILQSGMTLLLL

SEQ ID NO: 24365 - protein, 11 aa, BK virus
LQSGMTLLLLL

SEQ ID NO: 24366 - protein, 11 aa, BK virus
QSGMTLLLLLI

SEQ ID NO: 24367 - protein, 11 aa, BK virus
SGMTLLLLLIW

SEQ ID NO: 24368 - protein, 11 aa, BK virus
GMTLLLLLIWF

SEQ ID NO: 24369 - protein, 11 aa, BK virus
MTLLLLLIWFR

SEQ ID NO: 24370 - protein, 11 aa, BK virus
TLLLLLIWFRP

SEQ ID NO: 24371 - protein, 11 aa, BK virus
LLLLLIWFRPV

SEQ ID NO: 24372 - protein, 11 aa, BK virus
LLLLIWFRPVA

SEQ ID NO: 24373 - protein, 11 aa, BK virus
LLLIWFRPVAD

SEQ ID NO: 24374 - protein, 11 aa, BK virus
LLIWFRPVADF

SEQ ID NO: 24375 - protein, 11 aa, BK virus
LIWFRPVADFA

SEQ ID NO: 24376 - protein, 11 aa, BK virus
IWFRPVADFAT

SEQ ID NO: 24377 - protein, 11 aa, BK virus
WFRPVADFATD

SEQ ID NO: 24378 - protein, 11 aa, BK virus
FRPVADFATDI

SEQ ID NO: 24379 - protein, 11 aa, BK virus
RPVADFATDIQ

SEQ ID NO: 24380 - protein, 11 aa, BK virus
PVADFATDIQS

SEQ ID NO: 24381 - protein, 11 aa, BK virus
VADFATDIQSR

SEQ ID NO: 24382 - protein, 11 aa, BK virus
ADFATDIQSRI

SEQ ID NO: 24383 - protein, 11 aa, BK virus
DFATDIQSRIV

SEQ ID NO: 24384 - protein, 11 aa, BK virus
FATDIQSRIVE

SEQ ID NO: 24385 - protein, 11 aa, BK virus
ATDIQSRIVEW

SEQ ID NO: 24386 - protein, 11 aa, BK virus
TDIQSRIVEWK

SEQ ID NO: 24387 - protein, 11 aa, BK virus
DIQSRIVEWKE

SEQ ID NO: 24388 - protein, 11 aa, BK virus
IQSRIVEWKER

SEQ ID NO: 24389 - protein, 11 aa, BK virus
QSRIVEWKERL

SEQ ID NO: 24390 - protein, 11 aa, BK virus
SRIVEWKERLD

SEQ ID NO: 24391 - protein, 11 aa, BK virus
RIVEWKERLDS

SEQ ID NO: 24392 - protein, 11 aa, BK virus
IVEWKERLDSE

SEQ ID NO: 24393 - protein, 11 aa, BK virus
VEWKERLDSEI

SEQ ID NO: 24394 - protein, 11 aa, BK virus
EWKERLDSEIS

SEQ ID NO: 24395 - protein, 11 aa, BK virus
WKERLDSEISM

SEQ ID NO: 24396 - protein, 11 aa, BK virus
KERLDSEISMY

SEQ ID NO: 24397 - protein, 11 aa, BK virus
ERLDSEISMYT

SEQ ID NO: 24398 - protein, 11 aa, BK virus
RLDSEISMYTF

SEQ ID NO: 24399 - protein, 11 aa, BK virus
LDSEISMYTFS

SEQ ID NO: 24400 - protein, 11 aa, BK virus
DSEISMYTFSR

SEQ ID NO: 24401 - protein, 11 aa, BK virus
SEISMYTFSRM

SEQ ID NO: 24402 - protein, 11 aa, BK virus
EISMYTFSRMK

SEQ ID NO: 24403 - protein, 11 aa, BK virus
ISMYTFSRMKY

SEQ ID NO: 24404 - protein, 11 aa, BK virus
SMYTFSRMKYN

SEQ ID NO: 24405 - protein, 11 aa, BK virus
MYTFSRMKYNI

SEQ ID NO: 24406 - protein, 11 aa, BK virus
YTFSRMKYNIC

SEQ ID NO: 24407 - protein, 11 aa, BK virus
TFSRMKYNICM

SEQ ID NO: 24408 - protein, 11 aa, BK virus
FSRMKYNICMG

SEQ ID NO: 24409 - protein, 11 aa, BK virus
SRMKYNICMGK

SEQ ID NO: 24410 - protein, 11 aa, BK virus
RMKYNICMGKC

SEQ ID NO: 24411 - protein, 11 aa, BK virus
MKYNICMGKCI

SEQ ID NO: 24412 - protein, 11 aa, BK virus
KYNICMGKCIL

SEQ ID NO: 24413 - protein, 11 aa, BK virus
YNICMGKCILD

SEQ ID NO: 24414 - protein, 11 aa, BK virus
NICMGKCILDI

SEQ ID NO: 24415 - protein, 11 aa, BK virus
ICMGKCILDIT

SEQ ID NO: 24416 - protein, 11 aa, BK virus
CMGKCILDITR

SEQ ID NO: 24417 - protein, 11 aa, BK virus
MGKCILDITRE

SEQ ID NO: 24418 - protein, 11 aa, BK virus
GKCILDITREE

SEQ ID NO: 24419 - protein, 11 aa, BK virus
KCILDITREED

SEQ ID NO: 24420 - protein, 11 aa, BK virus
CILDITREEDS

SEQ ID NO: 24421 - protein, 11 aa, BK virus
ILDITREEDSE

SEQ ID NO: 24422 - protein, 11 aa, BK virus
LDITREEDSET

SEQ ID NO: 24423 - protein, 11 aa, BK virus
DITREEDSETE

SEQ ID NO: 24424 - protein, 11 aa, BK virus
ITREEDSETED

SEQ ID NO: 24425 - protein, 11 aa, BK virus
TREEDSETEDS

SEQ ID NO: 24426 - protein, 11 aa, BK virus
REEDSETEDSG

SEQ ID NO: 24427 - protein, 11 aa, BK virus
EEDSETEDSGH

SEQ ID NO: 24428 - protein, 11 aa, BK virus
EDSETEDSGHG

SEQ ID NO: 24429 - protein, 11 aa, BK virus
DSETEDSGHGS

SEQ ID NO: 24430 - protein, 11 aa, BK virus
SETEDSGHGSS

SEQ ID NO: 24431 - protein, 11 aa, BK virus
ETEDSGHGSST

SEQ ID NO: 24432 - protein, 11 aa, BK virus
TEDSGHGSSTE

SEQ ID NO: 24433 - protein, 11 aa, BK virus
EDSGHGSSTES

SEQ ID NO: 24434 - protein, 11 aa, BK virus
DSGHGSSTESQ

SEQ ID NO: 24435 - protein, 11 aa, BK virus
SGHGSSTESQS

SEQ ID NO: 24436 - protein, 11 aa, BK virus
GHGSSTESQSQ

SEQ ID NO: 24437 - protein, 11 aa, BK virus
HGSSTESQSQC

SEQ ID NO: 24438 - protein, 11 aa, BK virus
GSSTESQSQCS

SEQ ID NO: 24439 - protein, 11 aa, BK virus
SSTESQSQCSS

SEQ ID NO: 24440 - protein, 11 aa, BK virus
STESQSQCSSQ

SEQ ID NO: 24441 - protein, 11 aa, BK virus
TESQSQCSSQV

SEQ ID NO: 24442 - protein, 11 aa, BK virus
ESQSQCSSQVS

SEQ ID NO: 24443 - protein, 11 aa, BK virus
SQSQCSSQVSD

SEQ ID NO: 24444 - protein, 11 aa, BK virus
QSQCSSQVSDT

SEQ ID NO: 24445 - protein, 11 aa, BK virus
SQCSSQVSDTS

SEQ ID NO: 24446 - protein, 11 aa, BK virus
QCSSQVSDTSA

SEQ ID NO: 24447 - protein, 11 aa, BK virus
CSSQVSDTSAP

SEQ ID NO: 24448 - protein, 11 aa, BK virus
SSQVSDTSAPA

SEQ ID NO: 24449 - protein, 11 aa, BK virus
SQVSDTSAPAE

SEQ ID NO: 24450 - protein, 11 aa, BK virus
QVSDTSAPAED

SEQ ID NO: 24451 - protein, 11 aa, BK virus
VSDTSAPAEDS

SEQ ID NO: 24452 - protein, 11 aa, BK virus
SDTSAPAEDSQ

SEQ ID NO: 24453 - protein, 11 aa, BK virus
DTSAPAEDSQR

SEQ ID NO: 24454 - protein, 11 aa, BK virus
TSAPAEDSQRS

SEQ ID NO: 24455 - protein, 11 aa, BK virus
SAPAEDSQRSD

SEQ ID NO: 24456 - protein, 11 aa, BK virus
APAEDSQRSDP

SEQ ID NO: 24457 - protein, 11 aa, BK virus
PAEDSQRSDPH

SEQ ID NO: 24458 - protein, 11 aa, BK virus
AEDSQRSDPHS

SEQ ID NO: 24459 - protein, 11 aa, BK virus
EDSQRSDPHSQ

SEQ ID NO: 24460 - protein, 11 aa, BK virus
DSQRSDPHSQE

SEQ ID NO: 24461 - protein, 11 aa, BK virus
SQRSDPHSQEL

SEQ ID NO: 24462 - protein, 11 aa, BK virus
QRSDPHSQELH

SEQ ID NO: 24463 - protein, 11 aa, BK virus
RSDPHSQELHL

SEQ ID NO: 24464 - protein, 11 aa, BK virus
SDPHSQELHLC

SEQ ID NO: 24465 - protein, 11 aa, BK virus
DPHSQELHLCK

SEQ ID NO: 24466 - protein, 11 aa, BK virus
PHSQELHLCKG

SEQ ID NO: 24467 - protein, 11 aa, BK virus
HSQELHLCKGF

SEQ ID NO: 24468 - protein, 11 aa, BK virus
SQELHLCKGFQ

SEQ ID NO: 24469 - protein, 11 aa, BK virus
QELHLCKGFQC

SEQ ID NO: 24470 - protein, 11 aa, BK virus
ELHLCKGFQCF

SEQ ID NO: 24471 - protein, 11 aa, BK virus
LHLCKGFQCFK

SEQ ID NO: 24472 - protein, 11 aa, BK virus
HLCKGFQCFKR

SEQ ID NO: 24473 - protein, 11 aa, BK virus
LCKGFQCFKRP

SEQ ID NO: 24474 - protein, 11 aa, BK virus
CKGFQCFKRPK

SEQ ID NO: 24475 - protein, 11 aa, BK virus
KGFQCFKRPKT

SEQ ID NO: 24476 - protein, 11 aa, BK virus
GFQCFKRPKTP

SEQ ID NO: 24477 - protein, 11 aa, BK virus
FQCFKRPKTPP

SEQ ID NO: 24478 - protein, 11 aa, BK virus
QCFKRPKTPPP

SEQ ID NO: 24479 - protein, 11 aa, BK virus
CFKRPKTPPPK

SEQ ID NO: 24480 - protein, 11 aa, BK virus
HKLKSGLYKSS

SEQ ID NO: 24481 - protein, 11 aa, BK virus
KLKSGLYKSSI

SEQ ID NO: 24482 - protein, 11 aa, BK virus
LKSGLYKSSIY

SEQ ID NO: 24483 - protein, 11 aa, BK virus
MYMYNKSTCLK

SEQ ID NO: 24484 - protein, 11 aa, BK virus
YMYNKSTCLKH

SEQ ID NO: 24485 - protein, 11 aa, BK virus
MYNKSTCLKHF

SEQ ID NO: 24486 - protein, 11 aa, BK virus
YNKSTCLKHFG

SEQ ID NO: 24487 - protein, 11 aa, BK virus
NKSTCLKHFGL

SEQ ID NO: 24488 - protein, 11 aa, BK virus
KSTCLKHFGLQ

SEQ ID NO: 24489 - protein, 11 aa, BK virus
STCLKHFGLQL

SEQ ID NO: 24490 - protein, 11 aa, BK virus
TCLKHFGLQLS

SEQ ID NO: 24491 - protein, 11 aa, BK virus
CLKHFGLQLSL

SEQ ID NO: 24492 - protein, 11 aa, BK virus
LKHFGLQLSLF

SEQ ID NO: 24493 - protein, 11 aa, BK virus
KHFGLQLSLFV

SEQ ID NO: 24494 - protein, 11 aa, BK virus
HFGLQLSLFVN

SEQ ID NO: 24495 - protein, 11 aa, BK virus
FGLQLSLFVNI

SEQ ID NO: 24496 - protein, 11 aa, BK virus
GLQLSLFVNIS

SEQ ID NO: 24497 - protein, 11 aa, BK virus
LQLSLFVNISY

SEQ ID NO: 24498 - protein, 11 aa, BK virus
QLSLFVNISYH

SEQ ID NO: 24499 - protein, 11 aa, BK virus
LSLFVNISYHI

SEQ ID NO: 24500 - protein, 11 aa, BK virus
SLFVNISYHIW

SEQ ID NO: 24501 - protein, 11 aa, BK virus
LFVNISYHIWV

SEQ ID NO: 24502 - protein, 11 aa, BK virus
FVNISYHIWVP

SEQ ID NO: 24503 - protein, 11 aa, BK virus
VNISYHIWVPW

SEQ ID NO: 24504 - protein, 11 aa, BK virus
NISYHIWVPWK

SEQ ID NO: 24505 - protein, 11 aa, BK virus
ISYHIWVPWKS

SEQ ID NO: 24506 - protein, 11 aa, BK virus
SYHIWVPWKSF

SEQ ID NO: 24507 - protein, 11 aa, BK virus
YHIWVPWKSFC

SEQ ID NO: 24508 - protein, 11 aa, BK virus
HIWVPWKSFCA

SEQ ID NO: 24509 - protein, 11 aa, BK virus
IWVPWKSFCAI

SEQ ID NO: 24510 - protein, 11 aa, BK virus
WVPWKSFCAIK

SEQ ID NO: 24511 - protein, 11 aa, BK virus
VPWKSFCAIKH

SEQ ID NO: 24512 - protein, 11 aa, BK virus
PWKSFCAIKHP

SEQ ID NO: 24513 - protein, 11 aa, BK virus
WKSFCAIKHPN

SEQ ID NO: 24514 - protein, 11 aa, BK virus
KSFCAIKHPNL

SEQ ID NO: 24515 - protein, 11 aa, BK virus
SFCAIKHPNLF

SEQ ID NO: 24516 - protein, 11 aa, BK virus
FCAIKHPNLFY

SEQ ID NO: 24517 - protein, 11 aa, BK virus
CAIKHPNLFYL

SEQ ID NO: 24518 - protein, 11 aa, BK virus
AIKHPNLFYLG

SEQ ID NO: 24519 - protein, 11 aa, BK virus
IKHPNLFYLGF

SEQ ID NO: 24520 - protein, 11 aa, BK virus
KHPNLFYLGFH

SEQ ID NO: 24521 - protein, 11 aa, BK virus
HPNLFYLGFHT

SEQ ID NO: 24522 - protein, 11 aa, BK virus
PNLFYLGFHTI

SEQ ID NO: 24523 - protein, 11 aa, BK virus
NLFYLGFHTIH

SEQ ID NO: 24524 - protein, 11 aa, BK virus
LFYLGFHTIHR

SEQ ID NO: 24525 - protein, 11 aa, BK virus
FYLGFHTIHRL

SEQ ID NO: 24526 - protein, 11 aa, BK virus
YLGFHTIHRLP

SEQ ID NO: 24527 - protein, 11 aa, BK virus
LGFHTIHRLPI

SEQ ID NO: 24528 - protein, 11 aa, BK virus
GFHTIHRLPIH

SEQ ID NO: 24529 - protein, 11 aa, BK virus
FHTIHRLPIHS

SEQ ID NO: 24530 - protein, 11 aa, BK virus
HTIHRLPIHSL

SEQ ID NO: 24531 - protein, 11 aa, BK virus
TIHRLPIHSLG

SEQ ID NO: 24532 - protein, 11 aa, BK virus
IHRLPIHSLGS

SEQ ID NO: 24533 - protein, 11 aa, BK virus
HRLPIHSLGSP

SEQ ID NO: 24534 - protein, 11 aa, BK virus
RLPIHSLGSPV

SEQ ID NO: 24535 - protein, 11 aa, BK virus
LPIHSLGSPVY

SEQ ID NO: 24536 - protein, 11 aa, BK virus
PIHSLGSPVYK

SEQ ID NO: 24537 - protein, 11 aa, BK virus
IHSLGSPVYKV

SEQ ID NO: 24538 - protein, 11 aa, BK virus
HSLGSPVYKVT

SEQ ID NO: 24539 - protein, 11 aa, BK virus
QKGNWVRILYR

SEQ ID NO: 24540 - protein, 11 aa, BK virus
KGNWVRILYRS

SEQ ID NO: 24541 - protein, 11 aa, BK virus
GNWVRILYRSF

SEQ ID NO: 24542 - protein, 11 aa, BK virus
NWVRILYRSFS

SEQ ID NO: 24543 - protein, 11 aa, BK virus
WVRILYRSFSQ

SEQ ID NO: 24544 - protein, 11 aa, BK virus
VRILYRSFSQA

SEQ ID NO: 24545 - protein, 11 aa, BK virus
RILYRSFSQAD

SEQ ID NO: 24546 - protein, 11 aa, BK virus
ILYRSFSQADL

SEQ ID NO: 24547 - protein, 11 aa, BK virus
LYRSFSQADLK

SEQ ID NO: 24548 - protein, 11 aa, BK virus
YRSFSQADLKI

SEQ ID NO: 24549 - protein, 11 aa, BK virus
RSFSQADLKIS

SEQ ID NO: 24550 - protein, 11 aa, BK virus
SFSQADLKISC

SEQ ID NO: 24551 - protein, 11 aa, BK virus
FSQADLKISCK

SEQ ID NO: 24552 - protein, 11 aa, BK virus
SQADLKISCKA

SEQ ID NO: 24553 - protein, 11 aa, BK virus
QADLKISCKAS

SEQ ID NO: 24554 - protein, 11 aa, BK virus
ADLKISCKASP

SEQ ID NO: 24555 - protein, 11 aa, BK virus
DLKISCKASPL

SEQ ID NO: 24556 - protein, 11 aa, BK virus
LKISCKASPLL

SEQ ID NO: 24557 - protein, 11 aa, BK virus
KISCKASPLLC

SEQ ID NO: 24558 - protein, 11 aa, BK virus
ISCKASPLLCS

SEQ ID NO: 24559 - protein, 11 aa, BK virus
SCKASPLLCSR

SEQ ID NO: 24560 - protein, 11 aa, BK virus
CKASPLLCSRA

SEQ ID NO: 24561 - protein, 11 aa, BK virus
KASPLLCSRAV

SEQ ID NO: 24562 - protein, 11 aa, BK virus
ASPLLCSRAVS

SEQ ID NO: 24563 - protein, 11 aa, BK virus
SPLLCSRAVSK

SEQ ID NO: 24564 - protein, 11 aa, BK virus
PLLCSRAVSKQ

SEQ ID NO: 24565 - protein, 11 aa, BK virus
LLCSRAVSKQA

SEQ ID NO: 24566 - protein, 11 aa, BK virus
LCSRAVSKQAT

SEQ ID NO: 24567 - protein, 11 aa, BK virus
CSRAVSKQATN

SEQ ID NO: 24568 - protein, 11 aa, BK virus
SRAVSKQATNI

SEQ ID NO: 24569 - protein, 11 aa, BK virus
RAVSKQATNIS

SEQ ID NO: 24570 - protein, 11 aa, BK virus
AVSKQATNISS

SEQ ID NO: 24571 - protein, 11 aa, BK virus
NIQAISFTKRP

SEQ ID NO: 24572 - protein, 11 aa, BK virus
IQAISFTKRPH

SEQ ID NO: 24573 - protein, 11 aa, BK virus
QAISFTKRPHT

SEQ ID NO: 24574 - protein, 11 aa, BK virus
AISFTKRPHTL

SEQ ID NO: 24575 - protein, 11 aa, BK virus
ISFTKRPHTLF

SEQ ID NO: 24576 - protein, 11 aa, BK virus
SFTKRPHTLFI

SEQ ID NO: 24577 - protein, 11 aa, BK virus
QHCGSCVGHMK

SEQ ID NO: 24578 - protein, 11 aa, BK virus
HCGSCVGHMKY

SEQ ID NO: 24579 - protein, 11 aa, BK virus
CGSCVGHMKYW

SEQ ID NO: 24580 - protein, 11 aa, BK virus
GSCVGHMKYWG

SEQ ID NO: 24581 - protein, 11 aa, BK virus
SCVGHMKYWGN

SEQ ID NO: 24582 - protein, 11 aa, BK virus
CVGHMKYWGNI

SEQ ID NO: 24583 - protein, 11 aa, BK virus
VGHMKYWGNIF

SEQ ID NO: 24584 - protein, 11 aa, BK virus
GHMKYWGNIFP

SEQ ID NO: 24585 - protein, 11 aa, BK virus
HMKYWGNIFPS

SEQ ID NO: 24586 - protein, 11 aa, BK virus
MKYWGNIFPSC

SEQ ID NO: 24587 - protein, 11 aa, BK virus
KYWGNIFPSCE

SEQ ID NO: 24588 - protein, 11 aa, BK virus
YWGNIFPSCES

SEQ ID NO: 24589 - protein, 11 aa, BK virus
WGNIFPSCESP

SEQ ID NO: 24590 - protein, 11 aa, BK virus
GNIFPSCESPK

SEQ ID NO: 24591 - protein, 11 aa, BK virus
NIFPSCESPKI

SEQ ID NO: 24592 - protein, 11 aa, BK virus
IFPSCESPKIP

SEQ ID NO: 24593 - protein, 11 aa, BK virus
FPSCESPKIPS

SEQ ID NO: 24594 - protein, 11 aa, BK virus
PSCESPKIPSI

SEQ ID NO: 24595 - protein, 11 aa, BK virus
SCESPKIPSIF

SEQ ID NO: 24596 - protein, 11 aa, BK virus
CESPKIPSIFI

SEQ ID NO: 24597 - protein, 11 aa, BK virus
ESPKIPSIFIS

SEQ ID NO: 24598 - protein, 11 aa, BK virus
SPKIPSIFIST

SEQ ID NO: 24599 - protein, 11 aa, BK virus
PKIPSIFISTG

SEQ ID NO: 24600 - protein, 11 aa, BK virus
KIPSIFISTGI

SEQ ID NO: 24601 - protein, 11 aa, BK virus
IPSIFISTGIR

SEQ ID NO: 24602 - protein, 11 aa, BK virus
PSIFISTGIRY

SEQ ID NO: 24603 - protein, 11 aa, BK virus
SIFISTGIRYP

SEQ ID NO: 24604 - protein, 11 aa, BK virus
IFISTGIRYPA

SEQ ID NO: 24605 - protein, 11 aa, BK virus
FISTGIRYPAL

SEQ ID NO: 24606 - protein, 11 aa, BK virus
ISTGIRYPALN

SEQ ID NO: 24607 - protein, 11 aa, BK virus
STGIRYPALNW

SEQ ID NO: 24608 - protein, 11 aa, BK virus
TGIRYPALNWI

SEQ ID NO: 24609 - protein, 11 aa, BK virus
GIRYPALNWIS

SEQ ID NO: 24610 - protein, 11 aa, BK virus
IRYPALNWISI

SEQ ID NO: 24611 - protein, 11 aa, BK virus
RYPALNWISIV

SEQ ID NO: 24612 - protein, 11 aa, BK virus
YPALNWISIVF

SEQ ID NO: 24613 - protein, 11 aa, BK virus
PALNWISIVFV

SEQ ID NO: 24614 - protein, 11 aa, BK virus
ALNWISIVFVQ

SEQ ID NO: 24615 - protein, 11 aa, BK virus
LNWISIVFVQI

SEQ ID NO: 24616 - protein, 11 aa, BK virus
NWISIVFVQIG

SEQ ID NO: 24617 - protein, 11 aa, BK virus
WISIVFVQIGL

SEQ ID NO: 24618 - protein, 11 aa, BK virus
ISIVFVQIGLM

SEQ ID NO: 24619 - protein, 11 aa, BK virus
SIVFVQIGLMV

SEQ ID NO: 24620 - protein, 11 aa, BK virus
IVFVQIGLMVS

SEQ ID NO: 24621 - protein, 11 aa, BK virus
VFVQIGLMVSI

SEQ ID NO: 24622 - protein, 11 aa, BK virus
FVQIGLMVSIH

SEQ ID NO: 24623 - protein, 11 aa, BK virus
VQIGLMVSIHY

SEQ ID NO: 24624 - protein, 11 aa, BK virus
QIGLMVSIHYL

SEQ ID NO: 24625 - protein, 11 aa, BK virus
IGLMVSIHYLG

SEQ ID NO: 24626 - protein, 11 aa, BK virus
GLMVSIHYLGL

SEQ ID NO: 24627 - protein, 11 aa, BK virus
LMVSIHYLGLG

SEQ ID NO: 24628 - protein, 11 aa, BK virus
MVSIHYLGLGC

SEQ ID NO: 24629 - protein, 11 aa, BK virus
VSIHYLGLGCW

SEQ ID NO: 24630 - protein, 11 aa, BK virus
SIHYLGLGCWV

SEQ ID NO: 24631 - protein, 11 aa, BK virus
IHYLGLGCWVF

SEQ ID NO: 24632 - protein, 11 aa, BK virus
HYLGLGCWVFR

SEQ ID NO: 24633 - protein, 11 aa, BK virus
YLGLGCWVFRG

SEQ ID NO: 24634 - protein, 11 aa, BK virus
LGLGCWVFRGY

SEQ ID NO: 24635 - protein, 11 aa, BK virus
GLGCWVFRGYS

SEQ ID NO: 24636 - protein, 11 aa, BK virus
LGCWVFRGYST

SEQ ID NO: 24637 - protein, 11 aa, BK virus
GCWVFRGYSTI

SEQ ID NO: 24638 - protein, 11 aa, BK virus
CWVFRGYSTIR

SEQ ID NO: 24639 - protein, 11 aa, BK virus
WVFRGYSTIRV

SEQ ID NO: 24640 - protein, 11 aa, BK virus
VFRGYSTIRVL

SEQ ID NO: 24641 - protein, 11 aa, BK virus
HSLHFQGFSTY

SEQ ID NO: 24642 - protein, 11 aa, BK virus
SLHFQGFSTYS

SEQ ID NO: 24643 - protein, 11 aa, BK virus
LHFQGFSTYSK

SEQ ID NO: 24644 - protein, 11 aa, BK virus
HFQGFSTYSKE

SEQ ID NO: 24645 - protein, 11 aa, BK virus
FQGFSTYSKEV

SEQ ID NO: 24646 - protein, 11 aa, BK virus
QGFSTYSKEVE

SEQ ID NO: 24647 - protein, 11 aa, BK virus
GFSTYSKEVEI

SEQ ID NO: 24648 - protein, 11 aa, BK virus
FSTYSKEVEIT

SEQ ID NO: 24649 - protein, 11 aa, BK virus
STYSKEVEITA

SEQ ID NO: 24650 - protein, 11 aa, BK virus
TYSKEVEITAL

SEQ ID NO: 24651 - protein, 11 aa, BK virus
YSKEVEITALN

SEQ ID NO: 24652 - protein, 11 aa, BK virus
SKEVEITALNR

SEQ ID NO: 24653 - protein, 11 aa, BK virus
KEVEITALNRF

SEQ ID NO: 24654 - protein, 11 aa, BK virus
EVEITALNRFS

SEQ ID NO: 24655 - protein, 11 aa, BK virus
VEITALNRFSS

SEQ ID NO: 24656 - protein, 11 aa, BK virus
EITALNRFSST

SEQ ID NO: 24657 - protein, 11 aa, BK virus
ITALNRFSSTM

SEQ ID NO: 24658 - protein, 11 aa, BK virus
TALNRFSSTML

SEQ ID NO: 24659 - protein, 11 aa, BK virus
ALNRFSSTMLM

SEQ ID NO: 24660 - protein, 11 aa, BK virus
LNRFSSTMLMH

SEQ ID NO: 24661 - protein, 11 aa, BK virus
NRFSSTMLMHF

SEQ ID NO: 24662 - protein, 11 aa, BK virus
RFSSTMLMHFL

SEQ ID NO: 24663 - protein, 11 aa, BK virus
PCMKVKHASYS

SEQ ID NO: 24664 - protein, 11 aa, BK virus
CMKVKHASYSN

SEQ ID NO: 24665 - protein, 11 aa, BK virus
MKVKHASYSNN

SEQ ID NO: 24666 - protein, 11 aa, BK virus
KVKHASYSNNL

SEQ ID NO: 24667 - protein, 11 aa, BK virus
VKHASYSNNLC

SEQ ID NO: 24668 - protein, 11 aa, BK virus
KHASYSNNLCL

SEQ ID NO: 24669 - protein, 11 aa, BK virus
HASYSNNLCLY

SEQ ID NO: 24670 - protein, 11 aa, BK virus
ASYSNNLCLYS

SEQ ID NO: 24671 - protein, 11 aa, BK virus
SYSNNLCLYSY

SEQ ID NO: 24672 - protein, 11 aa, BK virus
YSNNLCLYSYS

SEQ ID NO: 24673 - protein, 11 aa, BK virus
SNNLCLYSYSL

SEQ ID NO: 24674 - protein, 11 aa, BK virus
NNLCLYSYSLP

SEQ ID NO: 24675 - protein, 11 aa, BK virus
NLCLYSYSLPH

SEQ ID NO: 24676 - protein, 11 aa, BK virus
LCLYSYSLPHQ

SEQ ID NO: 24677 - protein, 11 aa, BK virus
IGEGNSCCAVT

SEQ ID NO: 24678 - protein, 11 aa, BK virus
GEGNSCCAVTG

SEQ ID NO: 24679 - protein, 11 aa, BK virus
EGNSCCAVTGK

SEQ ID NO: 24680 - protein, 11 aa, BK virus
GNSCCAVTGKH

SEQ ID NO: 24681 - protein, 11 aa, BK virus
NSCCAVTGKHF

SEQ ID NO: 24682 - protein, 11 aa, BK virus
SCCAVTGKHFS

SEQ ID NO: 24683 - protein, 11 aa, BK virus
CCAVTGKHFSL

SEQ ID NO: 24684 - protein, 11 aa, BK virus
CAVTGKHFSLW

SEQ ID NO: 24685 - protein, 11 aa, BK virus
AVTGKHFSLWA

SEQ ID NO: 24686 - protein, 11 aa, BK virus
VTGKHFSLWAI

SEQ ID NO: 24687 - protein, 11 aa, BK virus
TGKHFSLWAIT

SEQ ID NO: 24688 - protein, 11 aa, BK virus
GKHFSLWAITA

SEQ ID NO: 24689 - protein, 11 aa, BK virus
KHFSLWAITAK

SEQ ID NO: 24690 - protein, 11 aa, BK virus
HFSLWAITAKV

SEQ ID NO: 24691 - protein, 11 aa, BK virus
FSLWAITAKVI

SEQ ID NO: 24692 - protein, 11 aa, BK virus
SLWAITAKVIF

SEQ ID NO: 24693 - protein, 11 aa, BK virus
LWAITAKVIFS

SEQ ID NO: 24694 - protein, 11 aa, BK virus
WAITAKVIFST

SEQ ID NO: 24695 - protein, 11 aa, BK virus
TKAPKVFIWIP

SEQ ID NO: 24696 - protein, 11 aa, BK virus
KAPKVFIWIPH

SEQ ID NO: 24697 - protein, 11 aa, BK virus
APKVFIWIPHF

SEQ ID NO: 24698 - protein, 11 aa, BK virus
PKVFIWIPHFW

SEQ ID NO: 24699 - protein, 11 aa, BK virus
KVFIWIPHFWV

SEQ ID NO: 24700 - protein, 11 aa, BK virus
EAFYLCNSIYP

SEQ ID NO: 24701 - protein, 11 aa, BK virus
AFYLCNSIYPS

SEQ ID NO: 24702 - protein, 11 aa, BK virus
FYLCNSIYPSF

SEQ ID NO: 24703 - protein, 11 aa, BK virus
YLCNSIYPSFN

SEQ ID NO: 24704 - protein, 11 aa, BK virus
LCNSIYPSFNF

SEQ ID NO: 24705 - protein, 11 aa, BK virus
FWHLHGFLWLF

SEQ ID NO: 24706 - protein, 11 aa, BK virus
WHLHGFLWLFG

SEQ ID NO: 24707 - protein, 11 aa, BK virus
HLHGFLWLFGS

SEQ ID NO: 24708 - protein, 11 aa, BK virus
LHGFLWLFGSC

SEQ ID NO: 24709 - protein, 11 aa, BK virus
HGFLWLFGSCP

SEQ ID NO: 24710 - protein, 11 aa, BK virus
GFLWLFGSCPW

SEQ ID NO: 24711 - protein, 11 aa, BK virus
FLWLFGSCPWT

SEQ ID NO: 24712 - protein, 11 aa, BK virus
LWLFGSCPWTL

SEQ ID NO: 24713 - protein, 11 aa, BK virus
WLFGSCPWTLS

SEQ ID NO: 24714 - protein, 11 aa, BK virus
LFGSCPWTLSF

SEQ ID NO: 24715 - protein, 11 aa, BK virus
FGSCPWTLSFS

SEQ ID NO: 24716 - protein, 11 aa, BK virus
GSCPWTLSFSF

SEQ ID NO: 24717 - protein, 11 aa, BK virus
SCPWTLSFSFG

SEQ ID NO: 24718 - protein, 11 aa, BK virus
CPWTLSFSFGW

SEQ ID NO: 24719 - protein, 11 aa, BK virus
PWTLSFSFGWG

SEQ ID NO: 24720 - protein, 11 aa, BK virus
WTLSFSFGWGH

SEQ ID NO: 24721 - protein, 11 aa, BK virus
TLSFSFGWGHL

SEQ ID NO: 24722 - protein, 11 aa, BK virus
LSFSFGWGHLH

SEQ ID NO: 24723 - protein, 11 aa, BK virus
SFSFGWGHLHM

SEQ ID NO: 24724 - protein, 11 aa, BK virus
FSFGWGHLHML

SEQ ID NO: 24725 - protein, 11 aa, BK virus
SFGWGHLHMLQ

SEQ ID NO: 24726 - protein, 11 aa, BK virus
FGWGHLHMLQE

SEQ ID NO: 24727 - protein, 11 aa, BK virus
GWGHLHMLQEQ

SEQ ID NO: 24728 - protein, 11 aa, BK virus
WGHLHMLQEQV

SEQ ID NO: 24729 - protein, 11 aa, BK virus
GHLHMLQEQVL

SEQ ID NO: 24730 - protein, 11 aa, BK virus
HLHMLQEQVLQ

SEQ ID NO: 24731 - protein, 11 aa, BK virus
LHMLQEQVLQS

SEQ ID NO: 24732 - protein, 11 aa, BK virus
HMLQEQVLQSR

SEQ ID NO: 24733 - protein, 11 aa, BK virus
MLQEQVLQSRT

SEQ ID NO: 24734 - protein, 11 aa, BK virus
LQEQVLQSRTG

SEQ ID NO: 24735 - protein, 11 aa, BK virus
QEQVLQSRTGL

SEQ ID NO: 24736 - protein, 11 aa, BK virus
EQVLQSRTGLE

SEQ ID NO: 24737 - protein, 11 aa, BK virus
QVLQSRTGLEV

SEQ ID NO: 24738 - protein, 11 aa, BK virus
VLQSRTGLEVK

SEQ ID NO: 24739 - protein, 11 aa, BK virus
LQSRTGLEVKA

SEQ ID NO: 24740 - protein, 11 aa, BK virus
QSRTGLEVKAT

SEQ ID NO: 24741 - protein, 11 aa, BK virus
SRTGLEVKATS

SEQ ID NO: 24742 - protein, 11 aa, BK virus
RTGLEVKATSI

SEQ ID NO: 24743 - protein, 11 aa, BK virus
TGLEVKATSIE

SEQ ID NO: 24744 - protein, 11 aa, BK virus
GLEVKATSIEE

SEQ ID NO: 24745 - protein, 11 aa, BK virus
LEVKATSIEEQ

SEQ ID NO: 24746 - protein, 11 aa, BK virus
EVKATSIEEQF

SEQ ID NO: 24747 - protein, 11 aa, BK virus
VKATSIEEQFF

SEQ ID NO: 24748 - protein, 11 aa, BK virus
KATSIEEQFFD

SEQ ID NO: 24749 - protein, 11 aa, BK virus
TLLNVHFVDFL

SEQ ID NO: 24750 - protein, 11 aa, BK virus
LLNVHFVDFLS

SEQ ID NO: 24751 - protein, 11 aa, BK virus
LNVHFVDFLSP

SEQ ID NO: 24752 - protein, 11 aa, BK virus
NVHFVDFLSPF

SEQ ID NO: 24753 - protein, 11 aa, BK virus
VHFVDFLSPFF

SEQ ID NO: 24754 - protein, 11 aa, BK virus
HFVDFLSPFFV

SEQ ID NO: 24755 - protein, 11 aa, BK virus
LLLYCQHHLYY

SEQ ID NO: 24756 - protein, 11 aa, BK virus
LLYCQHHLYYK

SEQ ID NO: 24757 - protein, 11 aa, BK virus
LYCQHHLYYKY

SEQ ID NO: 24758 - protein, 11 aa, BK virus
YCQHHLYYKYG

SEQ ID NO: 24759 - protein, 11 aa, BK virus
CQHHLYYKYGQ

SEQ ID NO: 24760 - protein, 11 aa, BK virus
QHHLYYKYGQN

SEQ ID NO: 24761 - protein, 11 aa, BK virus
HHLYYKYGQNV

SEQ ID NO: 24762 - protein, 11 aa, BK virus
HLYYKYGQNVH

SEQ ID NO: 24763 - protein, 11 aa, BK virus
LYYKYGQNVHG

SEQ ID NO: 24764 - protein, 11 aa, BK virus
YYKYGQNVHGY

SEQ ID NO: 24765 - protein, 11 aa, BK virus
YKYGQNVHGYL

SEQ ID NO: 24766 - protein, 11 aa, BK virus
KYGQNVHGYLP

SEQ ID NO: 24767 - protein, 11 aa, BK virus
YGQNVHGYLPF

SEQ ID NO: 24768 - protein, 11 aa, BK virus
GQNVHGYLPFQ

SEQ ID NO: 24769 - protein, 11 aa, BK virus
QNVHGYLPFQL

SEQ ID NO: 24770 - protein, 11 aa, BK virus
NVHGYLPFQLL

SEQ ID NO: 24771 - protein, 11 aa, BK virus
VHGYLPFQLLV

SEQ ID NO: 24772 - protein, 11 aa, BK virus
GKDQNNIVEYN

SEQ ID NO: 24773 - protein, 11 aa, BK virus
KDQNNIVEYNY

SEQ ID NO: 24774 - protein, 11 aa, BK virus
DQNNIVEYNYK

SEQ ID NO: 24775 - protein, 11 aa, BK virus
QNNIVEYNYKS

SEQ ID NO: 24776 - protein, 11 aa, BK virus
NNIVEYNYKSL

SEQ ID NO: 24777 - protein, 11 aa, BK virus
KIFLFFSAIPV

SEQ ID NO: 24778 - protein, 11 aa, BK virus
IFLFFSAIPVR

SEQ ID NO: 24779 - protein, 11 aa, BK virus
FLFFSAIPVRL

SEQ ID NO: 24780 - protein, 11 aa, BK virus
QKYLHQETEYH

SEQ ID NO: 24781 - protein, 11 aa, BK virus
KYLHQETEYHS

SEQ ID NO: 24782 - protein, 11 aa, BK virus
YLHQETEYHST

SEQ ID NO: 24783 - protein, 11 aa, BK virus
LHQETEYHSTH

SEQ ID NO: 24784 - protein, 11 aa, BK virus
HQETEYHSTHL

SEQ ID NO: 24785 - protein, 11 aa, BK virus
QETEYHSTHLG

SEQ ID NO: 24786 - protein, 11 aa, BK virus
TIPKPCLIADR

SEQ ID NO: 24787 - protein, 11 aa, BK virus
IPKPCLIADRG

SEQ ID NO: 24788 - protein, 11 aa, BK virus
PKPCLIADRGL

SEQ ID NO: 24789 - protein, 11 aa, BK virus
KPCLIADRGLQ

SEQ ID NO: 24790 - protein, 11 aa, BK virus
PCLIADRGLQW

SEQ ID NO: 24791 - protein, 11 aa, BK virus
CLIADRGLQWK

SEQ ID NO: 24792 - protein, 11 aa, BK virus
LIADRGLQWKL

SEQ ID NO: 24793 - protein, 11 aa, BK virus
IADRGLQWKLC

SEQ ID NO: 24794 - protein, 11 aa, BK virus
ADRGLQWKLCD

SEQ ID NO: 24795 - protein, 11 aa, BK virus
DRGLQWKLCDP

SEQ ID NO: 24796 - protein, 11 aa, BK virus
RGLQWKLCDPN

SEQ ID NO: 24797 - protein, 11 aa, BK virus
GLQWKLCDPNH

SEQ ID NO: 24798 - protein, 11 aa, BK virus
LQWKLCDPNHQ

SEQ ID NO: 24799 - protein, 11 aa, BK virus
QWKLCDPNHQR

SEQ ID NO: 24800 - protein, 11 aa, BK virus
WKLCDPNHQRT

SEQ ID NO: 24801 - protein, 11 aa, BK virus
KLCDPNHQRTY

SEQ ID NO: 24802 - protein, 11 aa, BK virus
LCDPNHQRTYT

SEQ ID NO: 24803 - protein, 11 aa, BK virus
CDPNHQRTYTL

SEQ ID NO: 24804 - protein, 11 aa, BK virus
DPNHQRTYTLL

SEQ ID NO: 24805 - protein, 11 aa, BK virus
PNHQRTYTLLE

SEQ ID NO: 24806 - protein, 11 aa, BK virus
NHQRTYTLLEL

SEQ ID NO: 24807 - protein, 11 aa, BK virus
HQRTYTLLELR

SEQ ID NO: 24808 - protein, 11 aa, BK virus
QRTYTLLELRN

SEQ ID NO: 24809 - protein, 11 aa, BK virus
PQEHQQLQHMF

SEQ ID NO: 24810 - protein, 11 aa, BK virus
QEHQQLQHMFE

SEQ ID NO: 24811 - protein, 11 aa, BK virus
EHQQLQHMFEE

SEQ ID NO: 24812 - protein, 11 aa, BK virus
HQQLQHMFEEL

SEQ ID NO: 24813 - protein, 11 aa, BK virus
QQLQHMFEELG

SEQ ID NO: 24814 - protein, 11 aa, BK virus
QLQHMFEELGL

SEQ ID NO: 24815 - protein, 11 aa, BK virus
QQQPPQQQFQP

SEQ ID NO: 24816 - protein, 11 aa, BK virus
QQPPQQQFQPL

SEQ ID NO: 24817 - protein, 11 aa, BK virus
QPPQQQFQPLK

SEQ ID NO: 24818 - protein, 11 aa, BK virus
PPQQQFQPLKI

SEQ ID NO: 24819 - protein, 11 aa, BK virus
PQQQFQPLKIL

SEQ ID NO: 24820 - protein, 11 aa, BK virus
QQQFQPLKILW

SEQ ID NO: 24821 - protein, 11 aa, BK virus
QQFQPLKILWQ

SEQ ID NO: 24822 - protein, 11 aa, BK virus
QFQPLKILWQQ

SEQ ID NO: 24823 - protein, 11 aa, BK virus
FQPLKILWQQQ

SEQ ID NO: 24824 - protein, 11 aa, BK virus
QPLKILWQQQP

SEQ ID NO: 24825 - protein, 11 aa, BK virus
PLKILWQQQPQ

SEQ ID NO: 24826 - protein, 11 aa, BK virus
LKILWQQQPQI

SEQ ID NO: 24827 - protein, 11 aa, BK virus
KILWQQQPQIH

SEQ ID NO: 24828 - protein, 11 aa, BK virus
ILWQQQPQIHW

SEQ ID NO: 24829 - protein, 11 aa, BK virus
LWQQQPQIHWQ

SEQ ID NO: 24830 - protein, 11 aa, BK virus
WQQQPQIHWQL

SEQ ID NO: 24831 - protein, 11 aa, BK virus
QQQPQIHWQLG

SEQ ID NO: 24832 - protein, 11 aa, BK virus
QQPQIHWQLGP

SEQ ID NO: 24833 - protein, 11 aa, BK virus
QPQIHWQLGPP

SEQ ID NO: 24834 - protein, 11 aa, BK virus
PQIHWQLGPPK

SEQ ID NO: 24835 - protein, 11 aa, BK virus
QIHWQLGPPKV

SEQ ID NO: 24836 - protein, 11 aa, BK virus
IHWQLGPPKVL

SEQ ID NO: 24837 - protein, 11 aa, BK virus
HWQLGPPKVLE

SEQ ID NO: 24838 - protein, 11 aa, BK virus
WQLGPPKVLEQ

SEQ ID NO: 24839 - protein, 11 aa, BK virus
QLGPPKVLEQH

SEQ ID NO: 24840 - protein, 11 aa, BK virus
LGPPKVLEQHP

SEQ ID NO: 24841 - protein, 11 aa, BK virus
TWKYKKKGITY

SEQ ID NO: 24842 - protein, 11 aa, BK virus
WKYKKKGITYL

SEQ ID NO: 24843 - protein, 11 aa, BK virus
KYKKKGITYLG

SEQ ID NO: 24844 - protein, 11 aa, BK virus
YKKKGITYLGV

SEQ ID NO: 24845 - protein, 11 aa, BK virus
KKKGITYLGVF

SEQ ID NO: 24846 - protein, 11 aa, BK virus
KKGITYLGVFY

SEQ ID NO: 24847 - protein, 11 aa, BK virus
KGITYLGVFYR

SEQ ID NO: 24848 - protein, 11 aa, BK virus
GITYLGVFYRV

SEQ ID NO: 24849 - protein, 11 aa, BK virus
ITYLGVFYRVF

SEQ ID NO: 24850 - protein, 11 aa, BK virus
TYLGVFYRVFY

SEQ ID NO: 24851 - protein, 11 aa, BK virus
YLGVFYRVFYS

SEQ ID NO: 24852 - protein, 11 aa, BK virus
LGVFYRVFYSR

SEQ ID NO: 24853 - protein, 11 aa, BK virus
SSGTFVFPVYT

SEQ ID NO: 24854 - protein, 11 aa, BK virus
SGTFVFPVYTV

SEQ ID NO: 24855 - protein, 11 aa, BK virus
GTFVFPVYTVF

SEQ ID NO: 24856 - protein, 11 aa, BK virus
TFVFPVYTVFT

SEQ ID NO: 24857 - protein, 11 aa, BK virus
FVFPVYTVFTS

SEQ ID NO: 24858 - protein, 11 aa, BK virus
VFPVYTVFTST

SEQ ID NO: 24859 - protein, 11 aa, BK virus
FPVYTVFTSTK

SEQ ID NO: 24860 - protein, 11 aa, BK virus
PVYTVFTSTKF

SEQ ID NO: 24861 - protein, 11 aa, BK virus
VYTVFTSTKFQ

SEQ ID NO: 24862 - protein, 11 aa, BK virus
YTVFTSTKFQQ

SEQ ID NO: 24863 - protein, 11 aa, BK virus
TVFTSTKFQQK

SEQ ID NO: 24864 - protein, 11 aa, BK virus
VFTSTKFQQKL

SEQ ID NO: 24865 - protein, 11 aa, BK virus
NKNKNPLSSFF

SEQ ID NO: 24866 - protein, 11 aa, BK virus
KNKNPLSSFFC

SEQ ID NO: 24867 - protein, 11 aa, BK virus
NKNPLSSFFCS

SEQ ID NO: 24868 - protein, 11 aa, BK virus
KNPLSSFFCSS

SEQ ID NO: 24869 - protein, 11 aa, BK virus
NPLSSFFCSSP

SEQ ID NO: 24870 - protein, 11 aa, BK virus
PLSSFFCSSPG

SEQ ID NO: 24871 - protein, 11 aa, BK virus
LSSFFCSSPGF

SEQ ID NO: 24872 - protein, 11 aa, BK virus
SSFFCSSPGFT

SEQ ID NO: 24873 - protein, 11 aa, BK virus
SFFCSSPGFTN

SEQ ID NO: 24874 - protein, 11 aa, BK virus
FFCSSPGFTNF

SEQ ID NO: 24875 - protein, 11 aa, BK virus
FCSSPGFTNFH

SEQ ID NO: 24876 - protein, 11 aa, BK virus
QLAQNHGLCPV

SEQ ID NO: 24877 - protein, 11 aa, BK virus
LGTRPRFLGSQ

SEQ ID NO: 24878 - protein, 11 aa, BK virus
GTRPRFLGSQN

SEQ ID NO: 24879 - protein, 11 aa, BK virus
TRPRFLGSQNM

SEQ ID NO: 24880 - protein, 11 aa, BK virus
RPRFLGSQNMS

SEQ ID NO: 24881 - protein, 11 aa, BK virus
PRFLGSQNMSV

SEQ ID NO: 24882 - protein, 11 aa, BK virus
RFLGSQNMSVM

SEQ ID NO: 24883 - protein, 11 aa, BK virus
FLGSQNMSVMH

SEQ ID NO: 24884 - protein, 11 aa, BK virus
LGSQNMSVMHF

SEQ ID NO: 24885 - protein, 11 aa, BK virus
GSQNMSVMHFP

SEQ ID NO: 24886 - protein, 11 aa, BK virus
SQNMSVMHFPS

SEQ ID NO: 24887 - protein, 11 aa, BK virus
AAPPCESCTFL

SEQ ID NO: 24888 - protein, 11 aa, BK virus
APPCESCTFLP

SEQ ID NO: 24889 - protein, 11 aa, BK virus
PPCESCTFLPE

SEQ ID NO: 24890 - protein, 11 aa, BK virus
PCESCTFLPEV

SEQ ID NO: 24891 - protein, 11 aa, BK virus
CESCTFLPEVM

SEQ ID NO: 24892 - protein, 11 aa, BK virus
ESCTFLPEVMV

SEQ ID NO: 24893 - protein, 11 aa, BK virus
SCTFLPEVMVW

SEQ ID NO: 24894 - protein, 11 aa, BK virus
CTFLPEVMVWL

SEQ ID NO: 24895 - protein, 11 aa, BK virus
TFLPEVMVWLH

SEQ ID NO: 24896 - protein, 11 aa, BK virus
FLPEVMVWLHS

SEQ ID NO: 24897 - protein, 11 aa, BK virus
LPEVMVWLHSP

SEQ ID NO: 24898 - protein, 11 aa, BK virus
PEVMVWLHSPV

SEQ ID NO: 24899 - protein, 11 aa, BK virus
EVMVWLHSPVS

SEQ ID NO: 24900 - protein, 11 aa, BK virus
VMVWLHSPVSH

SEQ ID NO: 24901 - protein, 11 aa, BK virus
MVWLHSPVSHA

SEQ ID NO: 24902 - protein, 11 aa, BK virus
VWLHSPVSHAL

SEQ ID NO: 24903 - protein, 11 aa, BK virus
WLHSPVSHALS

SEQ ID NO: 24904 - protein, 11 aa, BK virus
LHSPVSHALSF

SEQ ID NO: 24905 - protein, 11 aa, BK virus
HSPVSHALSFL

SEQ ID NO: 24906 - protein, 11 aa, BK virus
SPVSHALSFLR

SEQ ID NO: 24907 - protein, 11 aa, BK virus
PVSHALSFLRS

SEQ ID NO: 24908 - protein, 11 aa, BK virus
VSHALSFLRSW

SEQ ID NO: 24909 - protein, 11 aa, BK virus
SHALSFLRSWF

SEQ ID NO: 24910 - protein, 11 aa, BK virus
HALSFLRSWFG

SEQ ID NO: 24911 - protein, 11 aa, BK virus
ALSFLRSWFGC

SEQ ID NO: 24912 - protein, 11 aa, BK virus
LSFLRSWFGCI

SEQ ID NO: 24913 - protein, 11 aa, BK virus
SFLRSWFGCIP

SEQ ID NO: 24914 - protein, 11 aa, BK virus
FLRSWFGCIPW

SEQ ID NO: 24915 - protein, 11 aa, BK virus
LRSWFGCIPWV

SEQ ID NO: 24916 - protein, 11 aa, BK virus
RSWFGCIPWVS

SEQ ID NO: 24917 - protein, 11 aa, BK virus
SWFGCIPWVSS

SEQ ID NO: 24918 - protein, 11 aa, BK virus
WFGCIPWVSSS

SEQ ID NO: 24919 - protein, 11 aa, BK virus
FGCIPWVSSSS

SEQ ID NO: 24920 - protein, 11 aa, BK virus
GCIPWVSSSSL

SEQ ID NO: 24921 - protein, 11 aa, BK virus
CIPWVSSSSLW

SEQ ID NO: 24922 - protein, 11 aa, BK virus
IPWVSSSSLWP

SEQ ID NO: 24923 - protein, 11 aa, BK virus
PWVSSSSLWPF

SEQ ID NO: 24924 - protein, 11 aa, BK virus
WVSSSSLWPFF

SEQ ID NO: 24925 - protein, 11 aa, BK virus
VSSSSLWPFFL

SEQ ID NO: 24926 - protein, 11 aa, BK virus
YIRGRGRLCLH

SEQ ID NO: 24927 - protein, 11 aa, BK virus
IRGRGRLCLHP

SEQ ID NO: 24928 - protein, 11 aa, BK virus
RGRGRLCLHPF

SEQ ID NO: 24929 - protein, 11 aa, BK virus
GRGRLCLHPFS

SEQ ID NO: 24930 - protein, 11 aa, BK virus
RGRLCLHPFSQ

SEQ ID NO: 24931 - protein, 11 aa, BK virus
GRLCLHPFSQV

SEQ ID NO: 24932 - protein, 22 aa, BK virus
RLCLHPFSQVVLCLHPFSQVVR

SEQ ID NO: 24933 - protein, 11 aa, BK virus
CLHPFSQVVRV

SEQ ID NO: 24934 - protein, 11 aa, BK virus
LHPFSQVVRVW

SEQ ID NO: 24935 - protein, 11 aa, BK virus
HPFSQVVRVWR

SEQ ID NO: 24936 - protein, 11 aa, BK virus
PFSQVVRVWRL

SEQ ID NO: 24937 - protein, 11 aa, BK virus
FSQVVRVWRLF

SEQ ID NO: 24938 - protein, 11 aa, BK virus
SQVVRVWRLFL

SEQ ID NO: 24939 - protein, 11 aa, BK virus
QVVRVWRLFLR

SEQ ID NO: 24940 - protein, 11 aa, BK virus
VVRVWRLFLRP

SEQ ID NO: 24941 - protein, 11 aa, BK virus
VRVWRLFLRPS

SEQ ID NO: 24942 - protein, 11 aa, BK virus
RVWRLFLRPSK

SEQ ID NO: 24943 - protein, 11 aa, BK virus
VWRLFLRPSKT

SEQ ID NO: 24944 - protein, 11 aa, BK virus
WRLFLRPSKTI

SEQ ID NO: 24945 - protein, 11 aa, BK virus
RLFLRPSKTIW

SEQ ID NO: 24946 - protein, 11 aa, BK virus
LFLRPSKTIWG

SEQ ID NO: 24947 - protein, 11 aa, BK virus
FLRPSKTIWGN

SEQ ID NO: 24948 - protein, 11 aa, BK virus
LRPSKTIWGNP

SEQ ID NO: 24949 - protein, 11 aa, BK virus
RPSKTIWGNPY

SEQ ID NO: 24950 - protein, 11 aa, BK virus
PSKTIWGNPYS

SEQ ID NO: 24951 - protein, 11 aa, BK virus
SKTIWGNPYSF

SEQ ID NO: 24952 - protein, 11 aa, BK virus
KTIWGNPYSFA

SEQ ID NO: 24953 - protein, 11 aa, BK virus
TIWGNPYSFAI

SEQ ID NO: 24954 - protein, 11 aa, BK virus
IWGNPYSFAIF

SEQ ID NO: 24955 - protein, 11 aa, BK virus
WGNPYSFAIFA

SEQ ID NO: 24956 - protein, 11 aa, BK virus
GNPYSFAIFAK

SEQ ID NO: 24957 - protein, 13 aa, BK virus
FCKNCKRIGISPN

SEQ ID NO: 24958 - protein, 13 aa, BK virus
CKNCKRIGISPNS

SEQ ID NO: 24959 - protein, 13 aa, BK virus
KNCKRIGISPNSF

SEQ ID NO: 24960 - protein, 13 aa, BK virus
NCKRIGISPNSFA

SEQ ID NO: 24961 - protein, 13 aa, BK virus
CKRIGISPNSFAR

SEQ ID NO: 24962 - protein, 13 aa, BK virus
KRIGISPNSFARP

SEQ ID NO: 24963 - protein, 13 aa, BK virus
RIGISPNSFARPQ

SEQ ID NO: 24964 - protein, 13 aa, BK virus
IGISPNSFARPQK

SEQ ID NO: 24965 - protein, 13 aa, BK virus
GISPNSFARPQKK

SEQ ID NO: 24966 - protein, 13 aa, BK virus
ISPNSFARPQKKP

SEQ ID NO: 24967 - protein, 13 aa, BK virus
SPNSFARPQKKPP

SEQ ID NO: 24968 - protein, 13 aa, BK virus
PNSFARPQKKPPH

SEQ ID NO: 24969 - protein, 13 aa, BK virus
NSFARPQKKPPHP

SEQ ID NO: 24970 - protein, 13 aa, BK virus
SFARPQKKPPHPY

SEQ ID NO: 24971 - protein, 13 aa, BK virus
FARPQKKPPHPYY

SEQ ID NO: 24972 - protein, 13 aa, BK virus
ARPQKKPPHPYYL

SEQ ID NO: 24973 - protein, 13 aa, BK virus
RPQKKPPHPYYLR

SEQ ID NO: 24974 - protein, 13 aa, BK virus
PQKKPPHPYYLRE

SEQ ID NO: 24975 - protein, 13 aa, BK virus
QKKPPHPYYLRER

SEQ ID NO: 24976 - protein, 13 aa, BK virus
KKPPHPYYLRERV

SEQ ID NO: 24977 - protein, 13 aa, BK virus
KPPHPYYLRERVE

SEQ ID NO: 24978 - protein, 13 aa, BK virus
PPHPYYLRERVEA

SEQ ID NO: 24979 - protein, 13 aa, BK virus
PHPYYLRERVEAE

SEQ ID NO: 24980 - protein, 13 aa, BK virus
HPYYLRERVEAEA

SEQ ID NO: 24981 - protein, 13 aa, BK virus
PYYLRERVEAEAA

SEQ ID NO: 24982 - protein, 13 aa, BK virus
YYLRERVEAEAAS

SEQ ID NO: 24983 - protein, 13 aa, BK virus
YLRERVEAEAASA

SEQ ID NO: 24984 - protein, 13 aa, BK virus
LRERVEAEAASAS

SEQ ID NO: 24985 - protein, 13 aa, BK virus
RERVEAEAASASY

SEQ ID NO: 24986 - protein, 13 aa, BK virus
ERVEAEAASASYI

SEQ ID NO: 24987 - protein, 13 aa, BK virus
RVEAEAASASYIL

SEQ ID NO: 24988 - protein, 13 aa, BK virus
KKRPQGGAAYPWN

SEQ ID NO: 24989 - protein, 13 aa, BK virus
KRPQGGAAYPWNA

SEQ ID NO: 24990 - protein, 13 aa, BK virus
RPQGGAAYPWNAA

SEQ ID NO: 24991 - protein, 13 aa, BK virus
PQGGAAYPWNAAK

SEQ ID NO: 24992 - protein, 13 aa, BK virus
QGGAAYPWNAAKP

SEQ ID NO: 24993 - protein, 13 aa, BK virus
PQEGKCMTHRGMQ

SEQ ID NO: 24994 - protein, 13 aa, BK virus
QEGKCMTHRGMQP

SEQ ID NO: 24995 - protein, 13 aa, BK virus
EGKCMTHRGMQPN

SEQ ID NO: 24996 - protein, 13 aa, BK virus
GKCMTHRGMQPNH

SEQ ID NO: 24997 - protein, 13 aa, BK virus
KCMTHRGMQPNHD

SEQ ID NO: 24998 - protein, 13 aa, BK virus
CMTHRGMQPNHDL

SEQ ID NO: 24999 - protein, 13 aa, BK virus
MTHRGMQPNHDLR

SEQ ID NO: 25000 - protein, 13 aa, BK virus
THRGMQPNHDLRK

SEQ ID NO: 25001 - protein, 13 aa, BK virus
HRGMQPNHDLRKE

SEQ ID NO: 25002 - protein, 13 aa, BK virus
RGMQPNHDLRKES

SEQ ID NO: 25003 - protein, 13 aa, BK virus
GMQPNHDLRKESA

SEQ ID NO: 25004 - protein, 13 aa, BK virus
LTGRSCLPMECSQ

SEQ ID NO: 25005 - protein, 13 aa, BK virus
TGRSCLPMECSQT

SEQ ID NO: 25006 - protein, 13 aa, BK virus
GRSCLPMECSQTM

SEQ ID NO: 25007 - protein, 13 aa, BK virus
RSCLPMECSQTMT

SEQ ID NO: 25008 - protein, 13 aa, BK virus
SCLPMECSQTMTS

SEQ ID NO: 25009 - protein, 13 aa, BK virus
CLPMECSQTMTSG

SEQ ID NO: 25010 - protein, 13 aa, BK virus
LPMECSQTMTSGR

SEQ ID NO: 25011 - protein, 13 aa, BK virus
PMECSQTMTSGRK

SEQ ID NO: 25012 - protein, 13 aa, BK virus
MECSQTMTSGRKV

SEQ ID NO: 25013 - protein, 13 aa, BK virus
ECSQTMTSGRKVH

SEQ ID NO: 25014 - protein, 13 aa, BK virus
CSQTMTSGRKVHD

SEQ ID NO: 25015 - protein, 13 aa, BK virus
SQTMTSGRKVHDR

SEQ ID NO: 25016 - protein, 13 aa, BK virus
QTMTSGRKVHDRH

SEQ ID NO: 25017 - protein, 13 aa, BK virus
TMTSGRKVHDRHV

SEQ ID NO: 25018 - protein, 13 aa, BK virus
MTSGRKVHDRHVL

SEQ ID NO: 25019 - protein, 13 aa, BK virus
TSGRKVHDRHVLR

SEQ ID NO: 25020 - protein, 13 aa, BK virus
SGRKVHDRHVLRA

SEQ ID NO: 25021 - protein, 13 aa, BK virus
ESWPCPQLNWTKA

SEQ ID NO: 25022 - protein, 13 aa, BK virus
SWPCPQLNWTKAM

SEQ ID NO: 25023 - protein, 13 aa, BK virus
WPCPQLNWTKAMV

SEQ ID NO: 25024 - protein, 13 aa, BK virus
PCPQLNWTKAMVL

SEQ ID NO: 25025 - protein, 13 aa, BK virus
CPQLNWTKAMVLR

SEQ ID NO: 25026 - protein, 13 aa, BK virus
PQLNWTKAMVLRQ

SEQ ID NO: 25027 - protein, 13 aa, BK virus
QLNWTKAMVLRQL

SEQ ID NO: 25028 - protein, 13 aa, BK virus
LNWTKAMVLRQLS

SEQ ID NO: 25029 - protein, 13 aa, BK virus
NWTKAMVLRQLSR

SEQ ID NO: 25030 - protein, 13 aa, BK virus
WTKAMVLRQLSRQ

SEQ ID NO: 25031 - protein, 13 aa, BK virus
TKAMVLRQLSRQA

SEQ ID NO: 25032 - protein, 13 aa, BK virus
KAMVLRQLSRQAS

SEQ ID NO: 25033 - protein, 13 aa, BK virus
AMVLRQLSRQASV

SEQ ID NO: 25034 - protein, 13 aa, BK virus
MVLRQLSRQASVK

SEQ ID NO: 25035 - protein, 13 aa, BK virus
VLRQLSRQASVKV

SEQ ID NO: 25036 - protein, 13 aa, BK virus
LRQLSRQASVKVG

SEQ ID NO: 25037 - protein, 13 aa, BK virus
RQLSRQASVKVGK

SEQ ID NO: 25038 - protein, 13 aa, BK virus
QLSRQASVKVGKT

SEQ ID NO: 25039 - protein, 13 aa, BK virus
LSRQASVKVGKTW

SEQ ID NO: 25040 - protein, 13 aa, BK virus
SRQASVKVGKTWT

SEQ ID NO: 25041 - protein, 13 aa, BK virus
RQASVKVGKTWTG

SEQ ID NO: 25042 - protein, 13 aa, BK virus
QASVKVGKTWTGT

SEQ ID NO: 25043 - protein, 13 aa, BK virus
ASVKVGKTWTGTK

SEQ ID NO: 25044 - protein, 13 aa, BK virus
SVKVGKTWTGTKK

SEQ ID NO: 25045 - protein, 13 aa, BK virus
VKVGKTWTGTKKR

SEQ ID NO: 25046 - protein, 13 aa, BK virus
KVGKTWTGTKKRA

SEQ ID NO: 25047 - protein, 13 aa, BK virus
VGKTWTGTKKRAQ

SEQ ID NO: 25048 - protein, 13 aa, BK virus
GKTWTGTKKRAQR

SEQ ID NO: 25049 - protein, 13 aa, BK virus
KTWTGTKKRAQRI

SEQ ID NO: 25050 - protein, 13 aa, BK virus
TWTGTKKRAQRIF

SEQ ID NO: 25051 - protein, 13 aa, BK virus
WTGTKKRAQRIFI

SEQ ID NO: 25052 - protein, 13 aa, BK virus
TGTKKRAQRIFIF

SEQ ID NO: 25053 - protein, 13 aa, BK virus
GTKKRAQRIFIFI

SEQ ID NO: 25054 - protein, 13 aa, BK virus
TKKRAQRIFIFIL

SEQ ID NO: 25055 - protein, 13 aa, BK virus
KKRAQRIFIFILE

SEQ ID NO: 25056 - protein, 13 aa, BK virus
KRAQRIFIFILEL

SEQ ID NO: 25057 - protein, 13 aa, BK virus
RAQRIFIFILELL

SEQ ID NO: 25058 - protein, 13 aa, BK virus
AQRIFIFILELLL

SEQ ID NO: 25059 - protein, 13 aa, BK virus
QRIFIFILELLLE

SEQ ID NO: 25060 - protein, 13 aa, BK virus
RIFIFILELLLEF

SEQ ID NO: 25061 - protein, 13 aa, BK virus
IFIFILELLLEFC

SEQ ID NO: 25062 - protein, 13 aa, BK virus
FIFILELLLEFCR

SEQ ID NO: 25063 - protein, 13 aa, BK virus
IFILELLLEFCRG

SEQ ID NO: 25064 - protein, 13 aa, BK virus
FILELLLEFCRGE

SEQ ID NO: 25065 - protein, 13 aa, BK virus
ILELLLEFCRGED

SEQ ID NO: 25066 - protein, 13 aa, BK virus
LELLLEFCRGEDS

SEQ ID NO: 25067 - protein, 13 aa, BK virus
ELLLEFCRGEDSV

SEQ ID NO: 25068 - protein, 13 aa, BK virus
LLLEFCRGEDSVD

SEQ ID NO: 25069 - protein, 13 aa, BK virus
LLEFCRGEDSVDG

SEQ ID NO: 25070 - protein, 13 aa, BK virus
LEFCRGEDSVDGK

SEQ ID NO: 25071 - protein, 13 aa, BK virus
EFCRGEDSVDGKN

SEQ ID NO: 25072 - protein, 13 aa, BK virus
FCRGEDSVDGKNK

SEQ ID NO: 25073 - protein, 13 aa, BK virus
CRGEDSVDGKNKS

SEQ ID NO: 25074 - protein, 13 aa, BK virus
RGEDSVDGKNKST

SEQ ID NO: 25075 - protein, 13 aa, BK virus
GEDSVDGKNKSTT

SEQ ID NO: 25076 - protein, 13 aa, BK virus
EDSVDGKNKSTTA

SEQ ID NO: 25077 - protein, 13 aa, BK virus
DSVDGKNKSTTAL

SEQ ID NO: 25078 - protein, 13 aa, BK virus
SVDGKNKSTTALP

SEQ ID NO: 25079 - protein, 13 aa, BK virus
VDGKNKSTTALPA

SEQ ID NO: 25080 - protein, 13 aa, BK virus
DGKNKSTTALPAV

SEQ ID NO: 25081 - protein, 13 aa, BK virus
GKNKSTTALPAVK

SEQ ID NO: 25082 - protein, 13 aa, BK virus
KNKSTTALPAVKD

SEQ ID NO: 25083 - protein, 13 aa, BK virus
NKSTTALPAVKDS

SEQ ID NO: 25084 - protein, 13 aa, BK virus
KSTTALPAVKDSV

SEQ ID NO: 25085 - protein, 13 aa, BK virus
STTALPAVKDSVK

SEQ ID NO: 25086 - protein, 13 aa, BK virus
TTALPAVKDSVKD

SEQ ID NO: 25087 - protein, 13 aa, BK virus
TALPAVKDSVKDS

SEQ ID NO: 25088 - protein, 13 aa, BK virus
VSNPFFFVFPGSW

SEQ ID NO: 25089 - protein, 13 aa, BK virus
SNPFFFVFPGSWV

SEQ ID NO: 25090 - protein, 13 aa, BK virus
NPFFFVFPGSWVL

SEQ ID NO: 25091 - protein, 13 aa, BK virus
PFFFVFPGSWVLL

SEQ ID NO: 25092 - protein, 13 aa, BK virus
LPVYLRLLLPQDF

SEQ ID NO: 25093 - protein, 13 aa, BK virus
PVYLRLLLPQDFQ

SEQ ID NO: 25094 - protein, 13 aa, BK virus
VYLRLLLPQDFQW

SEQ ID NO: 25095 - protein, 13 aa, BK virus
YLRLLLPQDFQWL

SEQ ID NO: 25096 - protein, 13 aa, BK virus
LRLLLPQDFQWLK

SEQ ID NO: 25097 - protein, 13 aa, BK virus
RLLLPQDFQWLKL

SEQ ID NO: 25098 - protein, 13 aa, BK virus
LLLPQDFQWLKLL

SEQ ID NO: 25099 - protein, 13 aa, BK virus
LLPQDFQWLKLLL

SEQ ID NO: 25100 - protein, 13 aa, BK virus
LPQDFQWLKLLLG

SEQ ID NO: 25101 - protein, 13 aa, BK virus
PQDFQWLKLLLGR

SEQ ID NO: 25102 - protein, 13 aa, BK virus
QDFQWLKLLLGRL

SEQ ID NO: 25103 - protein, 13 aa, BK virus
DFQWLKLLLGRLL

SEQ ID NO: 25104 - protein, 13 aa, BK virus
FQWLKLLLGRLLL

SEQ ID NO: 25105 - protein, 13 aa, BK virus
QWLKLLLGRLLLL

SEQ ID NO: 25106 - protein, 13 aa, BK virus
LLVLLGLLLGLLL

SEQ ID NO: 25107 - protein, 13 aa, BK virus
GISSLMIGITKFP

SEQ ID NO: 25108 - protein, 13 aa, BK virus
ISSLMIGITKFPL

SEQ ID NO: 25109 - protein, 13 aa, BK virus
ASISNQAWLWNCL

SEQ ID NO: 25110 - protein, 13 aa, BK virus
SISNQAWLWNCLT

SEQ ID NO: 25111 - protein, 13 aa, BK virus
ISNQAWLWNCLTQ

SEQ ID NO: 25112 - protein, 13 aa, BK virus
SNQAWLWNCLTQM

SEQ ID NO: 25113 - protein, 13 aa, BK virus
NQAWLWNCLTQMS

SEQ ID NO: 25114 - protein, 13 aa, BK virus
QAWLWNCLTQMST

SEQ ID NO: 25115 - protein, 13 aa, BK virus
AWLWNCLTQMSTM

SEQ ID NO: 25116 - protein, 13 aa, BK virus
WLWNCLTQMSTMI

SEQ ID NO: 25117 - protein, 13 aa, BK virus
LWNCLTQMSTMIF

SEQ ID NO: 25118 - protein, 13 aa, BK virus
WNCLTQMSTMIFC

SEQ ID NO: 25119 - protein, 13 aa, BK virus
NCLTQMSTMIFCF

SEQ ID NO: 25120 - protein, 13 aa, BK virus
CLTQMSTMIFCFL

SEQ ID NO: 25121 - protein, 13 aa, BK virus
LTQMSTMIFCFLV

SEQ ID NO: 25122 - protein, 13 aa, BK virus
ILLLIIFNTLILG

SEQ ID NO: 25123 - protein, 13 aa, BK virus
LLLIIFNTLILGI

SEQ ID NO: 25124 - protein, 13 aa, BK virus
LLIIFNTLILGIG

SEQ ID NO: 25125 - protein, 13 aa, BK virus
LIIFNTLILGIGV

SEQ ID NO: 25126 - protein, 13 aa, BK virus
IIFNTLILGIGVL

SEQ ID NO: 25127 - protein, 13 aa, BK virus
IFNTLILGIGVLL

SEQ ID NO: 25128 - protein, 13 aa, BK virus
FNTLILGIGVLLC

SEQ ID NO: 25129 - protein, 13 aa, BK virus
NTLILGIGVLLCL

SEQ ID NO: 25130 - protein, 13 aa, BK virus
TLILGIGVLLCLL

SEQ ID NO: 25131 - protein, 13 aa, BK virus
LILGIGVLLCLLL

SEQ ID NO: 25132 - protein, 13 aa, BK virus
ILGIGVLLCLLLF

SEQ ID NO: 25133 - protein, 13 aa, BK virus
LGIGVLLCLLLFP

SEQ ID NO: 25134 - protein, 13 aa, BK virus
GIGVLLCLLLFPR

SEQ ID NO: 25135 - protein, 13 aa, BK virus
IGVLLCLLLFPRL

SEQ ID NO: 25136 - protein, 13 aa, BK virus
GVLLCLLLFPRLC

SEQ ID NO: 25137 - protein, 13 aa, BK virus
VLLCLLLFPRLCG

SEQ ID NO: 25138 - protein, 13 aa, BK virus
LLCLLLFPRLCGM

SEQ ID NO: 25139 - protein, 13 aa, BK virus
LCLLLFPRLCGML

SEQ ID NO: 25140 - protein, 13 aa, BK virus
CLLLFPRLCGMLL

SEQ ID NO: 25141 - protein, 13 aa, BK virus
LLLFPRLCGMLLG

SEQ ID NO: 25142 - protein, 13 aa, BK virus
LLFPRLCGMLLGM

SEQ ID NO: 25143 - protein, 13 aa, BK virus
LFPRLCGMLLGMI

SEQ ID NO: 25144 - protein, 13 aa, BK virus
FPRLCGMLLGMIY

SEQ ID NO: 25145 - protein, 13 aa, BK virus
PRLCGMLLGMIYL

SEQ ID NO: 25146 - protein, 13 aa, BK virus
RLCGMLLGMIYLL

SEQ ID NO: 25147 - protein, 13 aa, BK virus
PHRNCREEQKDFL

SEQ ID NO: 25148 - protein, 13 aa, BK virus
HRNCREEQKDFLE

SEQ ID NO: 25149 - protein, 13 aa, BK virus
RNCREEQKDFLET

SEQ ID NO: 25150 - protein, 13 aa, BK virus
NCREEQKDFLETP

SEQ ID NO: 25151 - protein, 13 aa, BK virus
CREEQKDFLETPW

SEQ ID NO: 25152 - protein, 13 aa, BK virus
REEQKDFLETPWL

SEQ ID NO: 25153 - protein, 13 aa, BK virus
EEQKDFLETPWLD

SEQ ID NO: 25154 - protein, 13 aa, BK virus
EQKDFLETPWLDF

SEQ ID NO: 25155 - protein, 13 aa, BK virus
QKDFLETPWLDFW

SEQ ID NO: 25156 - protein, 13 aa, BK virus
KDFLETPWLDFWR

SEQ ID NO: 25157 - protein, 13 aa, BK virus
DFLETPWLDFWRK

SEQ ID NO: 25158 - protein, 13 aa, BK virus
FLETPWLDFWRKL

SEQ ID NO: 25159 - protein, 13 aa, BK virus
LETPWLDFWRKLP

SEQ ID NO: 25160 - protein, 13 aa, BK virus
ETPWLDFWRKLPG

SEQ ID NO: 25161 - protein, 13 aa, BK virus
TPWLDFWRKLPGQ

SEQ ID NO: 25162 - protein, 13 aa, BK virus
PWLDFWRKLPGQL

SEQ ID NO: 25163 - protein, 13 aa, BK virus
TFIIIFNNIILIF

SEQ ID NO: 25164 - protein, 13 aa, BK virus
FIIIFNNIILIFP

SEQ ID NO: 25165 - protein, 13 aa, BK virus
IIIFNNIILIFPL

SEQ ID NO: 25166 - protein, 13 aa, BK virus
IIFNNIILIFPLL

SEQ ID NO: 25167 - protein, 13 aa, BK virus
IFNNIILIFPLLG

SEQ ID NO: 25168 - protein, 13 aa, BK virus
FNNIILIFPLLGP

SEQ ID NO: 25169 - protein, 13 aa, BK virus
NNIILIFPLLGPQ

SEQ ID NO: 25170 - protein, 13 aa, BK virus
NIILIFPLLGPQW

SEQ ID NO: 25171 - protein, 13 aa, BK virus
IILIFPLLGPQWL

SEQ ID NO: 25172 - protein, 13 aa, BK virus
ILIFPLLGPQWLD

SEQ ID NO: 25173 - protein, 13 aa, BK virus
LIFPLLGPQWLDK

SEQ ID NO: 25174 - protein, 13 aa, BK virus
LKGKVPVYILAIL

SEQ ID NO: 25175 - protein, 13 aa, BK virus
KGKVPVYILAILI

SEQ ID NO: 25176 - protein, 13 aa, BK virus
GKVPVYILAILIV

SEQ ID NO: 25177 - protein, 13 aa, BK virus
KKLLPQEVLIKEL

SEQ ID NO: 25178 - protein, 13 aa, BK virus
KLLPQEVLIKELL

SEQ ID NO: 25179 - protein, 13 aa, BK virus
LLPQEVLIKELLL

SEQ ID NO: 25180 - protein, 13 aa, BK virus
LPQEVLIKELLLN

SEQ ID NO: 25181 - protein, 13 aa, BK virus
PQEVLIKELLLNG

SEQ ID NO: 25182 - protein, 13 aa, BK virus
QEVLIKELLLNGC

SEQ ID NO: 25183 - protein, 13 aa, BK virus
EVLIKELLLNGCC

SEQ ID NO: 25184 - protein, 13 aa, BK virus
VLIKELLLNGCCL

SEQ ID NO: 25185 - protein, 13 aa, BK virus
LIKELLLNGCCLY

SEQ ID NO: 25186 - protein, 13 aa, BK virus
IKELLLNGCCLYF

SEQ ID NO: 25187 - protein, 13 aa, BK virus
HLLLKHMKMAPTK

SEQ ID NO: 25188 - protein, 13 aa, BK virus
LLLKHMKMAPTKR

SEQ ID NO: 25189 - protein, 13 aa, BK virus
LLKHMKMAPTKRK

SEQ ID NO: 25190 - protein, 13 aa, BK virus
LKHMKMAPTKRKG

SEQ ID NO: 25191 - protein, 13 aa, BK virus
KHMKMAPTKRKGE

SEQ ID NO: 25192 - protein, 13 aa, BK virus
HMKMAPTKRKGEC

SEQ ID NO: 25193 - protein, 13 aa, BK virus
MKMAPTKRKGECP

SEQ ID NO: 25194 - protein, 13 aa, BK virus
KMAPTKRKGECPG

SEQ ID NO: 25195 - protein, 13 aa, BK virus
MAPTKRKGECPGA

SEQ ID NO: 25196 - protein, 13 aa, BK virus
APTKRKGECPGAA

SEQ ID NO: 25197 - protein, 13 aa, BK virus
PTKRKGECPGAAP

SEQ ID NO: 25198 - protein, 13 aa, BK virus
TKRKGECPGAAPK

SEQ ID NO: 25199 - protein, 13 aa, BK virus
KRKGECPGAAPKK

SEQ ID NO: 25200 - protein, 13 aa, BK virus
RKGECPGAAPKKP

SEQ ID NO: 25201 - protein, 13 aa, BK virus
KGECPGAAPKKPK

SEQ ID NO: 25202 - protein, 13 aa, BK virus
GECPGAAPKKPKE

SEQ ID NO: 25203 - protein, 13 aa, BK virus
ECPGAAPKKPKEP

SEQ ID NO: 25204 - protein, 13 aa, BK virus
CPGAAPKKPKEPV

SEQ ID NO: 25205 - protein, 13 aa, BK virus
PGAAPKKPKEPVQ

SEQ ID NO: 25206 - protein, 13 aa, BK virus
GAAPKKPKEPVQV

SEQ ID NO: 25207 - protein, 13 aa, BK virus
AAPKKPKEPVQVP

SEQ ID NO: 25208 - protein, 13 aa, BK virus
APKKPKEPVQVPK

SEQ ID NO: 25209 - protein, 13 aa, BK virus
PKKPKEPVQVPKL

SEQ ID NO: 25210 - protein, 13 aa, BK virus
KKPKEPVQVPKLL

SEQ ID NO: 25211 - protein, 13 aa, BK virus
KPKEPVQVPKLLI

SEQ ID NO: 25212 - protein, 13 aa, BK virus
PKEPVQVPKLLIK

SEQ ID NO: 25213 - protein, 13 aa, BK virus
KEPVQVPKLLIKG

SEQ ID NO: 25214 - protein, 13 aa, BK virus
EPVQVPKLLIKGG

SEQ ID NO: 25215 - protein, 13 aa, BK virus
PVQVPKLLIKGGV

SEQ ID NO: 25216 - protein, 13 aa, BK virus
VQVPKLLIKGGVE

SEQ ID NO: 25217 - protein, 13 aa, BK virus
QVPKLLIKGGVEV

SEQ ID NO: 25218 - protein, 13 aa, BK virus
VPKLLIKGGVEVL

SEQ ID NO: 25219 - protein, 13 aa, BK virus
PKLLIKGGVEVLE

SEQ ID NO: 25220 - protein, 13 aa, BK virus
KLLIKGGVEVLEV

SEQ ID NO: 25221 - protein, 13 aa, BK virus
LLIKGGVEVLEVK

SEQ ID NO: 25222 - protein, 13 aa, BK virus
LIKGGVEVLEVKT

SEQ ID NO: 25223 - protein, 13 aa, BK virus
IKGGVEVLEVKTG

SEQ ID NO: 25224 - protein, 13 aa, BK virus
KGGVEVLEVKTGV

SEQ ID NO: 25225 - protein, 13 aa, BK virus
GGVEVLEVKTGVD

SEQ ID NO: 25226 - protein, 13 aa, BK virus
GVEVLEVKTGVDA

SEQ ID NO: 25227 - protein, 13 aa, BK virus
VEVLEVKTGVDAI

SEQ ID NO: 25228 - protein, 13 aa, BK virus
EVLEVKTGVDAIT

SEQ ID NO: 25229 - protein, 13 aa, BK virus
VLEVKTGVDAITE

SEQ ID NO: 25230 - protein, 13 aa, BK virus
LEVKTGVDAITEV

SEQ ID NO: 25231 - protein, 13 aa, BK virus
EVKTGVDAITEVE

SEQ ID NO: 25232 - protein, 13 aa, BK virus
VKTGVDAITEVEC

SEQ ID NO: 25233 - protein, 13 aa, BK virus
KTGVDAITEVECF

SEQ ID NO: 25234 - protein, 13 aa, BK virus
TGVDAITEVECFL

SEQ ID NO: 25235 - protein, 13 aa, BK virus
GVDAITEVECFLN

SEQ ID NO: 25236 - protein, 13 aa, BK virus
VDAITEVECFLNP

SEQ ID NO: 25237 - protein, 13 aa, BK virus
DAITEVECFLNPE

SEQ ID NO: 25238 - protein, 13 aa, BK virus
AITEVECFLNPEM

SEQ ID NO: 25239 - protein, 13 aa, BK virus
ITEVECFLNPEMG

SEQ ID NO: 25240 - protein, 13 aa, BK virus
TEVECFLNPEMGD

SEQ ID NO: 25241 - protein, 13 aa, BK virus
EVECFLNPEMGDP

SEQ ID NO: 25242 - protein, 13 aa, BK virus
VECFLNPEMGDPD

SEQ ID NO: 25243 - protein, 13 aa, BK virus
ECFLNPEMGDPDE

SEQ ID NO: 25244 - protein, 13 aa, BK virus
CFLNPEMGDPDEN

SEQ ID NO: 25245 - protein, 13 aa, BK virus
FLNPEMGDPDENL

SEQ ID NO: 25246 - protein, 13 aa, BK virus
LNPEMGDPDENLR

SEQ ID NO: 25247 - protein, 13 aa, BK virus
NPEMGDPDENLRG

SEQ ID NO: 25248 - protein, 13 aa, BK virus
PEMGDPDENLRGF

SEQ ID NO: 25249 - protein, 13 aa, BK virus
EMGDPDENLRGFS

SEQ ID NO: 25250 - protein, 13 aa, BK virus
MGDPDENLRGFSL

SEQ ID NO: 25251 - protein, 13 aa, BK virus
GDPDENLRGFSLK

SEQ ID NO: 25252 - protein, 13 aa, BK virus
DPDENLRGFSLKL

SEQ ID NO: 25253 - protein, 13 aa, BK virus
PDENLRGFSLKLS

SEQ ID NO: 25254 - protein, 13 aa, BK virus
DENLRGFSLKLSA

SEQ ID NO: 25255 - protein, 13 aa, BK virus
ENLRGFSLKLSAE

SEQ ID NO: 25256 - protein, 13 aa, BK virus
NLRGFSLKLSAEN

SEQ ID NO: 25257 - protein, 13 aa, BK virus
LRGFSLKLSAEND

SEQ ID NO: 25258 - protein, 13 aa, BK virus
RGFSLKLSAENDF

SEQ ID NO: 25259 - protein, 13 aa, BK virus
GFSLKLSAENDFS

SEQ ID NO: 25260 - protein, 13 aa, BK virus
FSLKLSAENDFSS

SEQ ID NO: 25261 - protein, 13 aa, BK virus
SLKLSAENDFSSD

SEQ ID NO: 25262 - protein, 13 aa, BK virus
LKLSAENDFSSDS

SEQ ID NO: 25263 - protein, 13 aa, BK virus
KLSAENDFSSDSP

SEQ ID NO: 25264 - protein, 13 aa, BK virus
LSAENDFSSDSPE

SEQ ID NO: 25265 - protein, 13 aa, BK virus
SAENDFSSDSPER

SEQ ID NO: 25266 - protein, 13 aa, BK virus
AENDFSSDSPERK

SEQ ID NO: 25267 - protein, 13 aa, BK virus
ENDFSSDSPERKM

SEQ ID NO: 25268 - protein, 13 aa, BK virus
NDFSSDSPERKML

SEQ ID NO: 25269 - protein, 13 aa, BK virus
DFSSDSPERKMLP

SEQ ID NO: 25270 - protein, 13 aa, BK virus
FSSDSPERKMLPC

SEQ ID NO: 25271 - protein, 13 aa, BK virus
SSDSPERKMLPCY

SEQ ID NO: 25272 - protein, 13 aa, BK virus
SDSPERKMLPCYS

SEQ ID NO: 25273 - protein, 13 aa, BK virus
DSPERKMLPCYST

SEQ ID NO: 25274 - protein, 13 aa, BK virus
SPERKMLPCYSTA

SEQ ID NO: 25275 - protein, 13 aa, BK virus
PERKMLPCYSTAR

SEQ ID NO: 25276 - protein, 13 aa, BK virus
ERKMLPCYSTARI

SEQ ID NO: 25277 - protein, 13 aa, BK virus
RKMLPCYSTARIP

SEQ ID NO: 25278 - protein, 13 aa, BK virus
KMLPCYSTARIPL

SEQ ID NO: 25279 - protein, 13 aa, BK virus
MLPCYSTARIPLP

SEQ ID NO: 25280 - protein, 13 aa, BK virus
LPCYSTARIPLPN

SEQ ID NO: 25281 - protein, 13 aa, BK virus
PCYSTARIPLPNL

SEQ ID NO: 25282 - protein, 13 aa, BK virus
CYSTARIPLPNLN

SEQ ID NO: 25283 - protein, 13 aa, BK virus
YSTARIPLPNLNE

SEQ ID NO: 25284 - protein, 13 aa, BK virus
STARIPLPNLNED

SEQ ID NO: 25285 - protein, 13 aa, BK virus
TARIPLPNLNEDL

SEQ ID NO: 25286 - protein, 13 aa, BK virus
ARIPLPNLNEDLT

SEQ ID NO: 25287 - protein, 13 aa, BK virus
RIPLPNLNEDLTC

SEQ ID NO: 25288 - protein, 13 aa, BK virus
IPLPNLNEDLTCG

SEQ ID NO: 25289 - protein, 13 aa, BK virus
PLPNLNEDLTCGN

SEQ ID NO: 25290 - protein, 13 aa, BK virus
LPNLNEDLTCGNL

SEQ ID NO: 25291 - protein, 13 aa, BK virus
PNLNEDLTCGNLL

SEQ ID NO: 25292 - protein, 13 aa, BK virus
NLNEDLTCGNLLM

SEQ ID NO: 25293 - protein, 13 aa, BK virus
LNEDLTCGNLLMW

SEQ ID NO: 25294 - protein, 13 aa, BK virus
NEDLTCGNLLMWE

SEQ ID NO: 25295 - protein, 13 aa, BK virus
EDLTCGNLLMWEA

SEQ ID NO: 25296 - protein, 13 aa, BK virus
DLTCGNLLMWEAV

SEQ ID NO: 25297 - protein, 13 aa, BK virus
LTCGNLLMWEAVT

SEQ ID NO: 25298 - protein, 13 aa, BK virus
TCGNLLMWEAVTV

SEQ ID NO: 25299 - protein, 13 aa, BK virus
CGNLLMWEAVTVQ

SEQ ID NO: 25300 - protein, 13 aa, BK virus
GNLLMWEAVTVQT

SEQ ID NO: 25301 - protein, 13 aa, BK virus
NLLMWEAVTVQTE

SEQ ID NO: 25302 - protein, 13 aa, BK virus
LLMWEAVTVQTEV

SEQ ID NO: 25303 - protein, 13 aa, BK virus
LMWEAVTVQTEVI

SEQ ID NO: 25304 - protein, 13 aa, BK virus
MWEAVTVQTEVIG

SEQ ID NO: 25305 - protein, 13 aa, BK virus
WEAVTVQTEVIGI

SEQ ID NO: 25306 - protein, 13 aa, BK virus
EAVTVQTEVIGIT

SEQ ID NO: 25307 - protein, 13 aa, BK virus
AVTVQTEVIGITS

SEQ ID NO: 25308 - protein, 13 aa, BK virus
VTVQTEVIGITSM

SEQ ID NO: 25309 - protein, 13 aa, BK virus
TVQTEVIGITSML

SEQ ID NO: 25310 - protein, 13 aa, BK virus
VQTEVIGITSMLN

SEQ ID NO: 25311 - protein, 13 aa, BK virus
QTEVIGITSMLNL

SEQ ID NO: 25312 - protein, 13 aa, BK virus
TEVIGITSMLNLH

SEQ ID NO: 25313 - protein, 13 aa, BK virus
EVIGITSMLNLHA

SEQ ID NO: 25314 - protein, 13 aa, BK virus
VIGITSMLNLHAG

SEQ ID NO: 25315 - protein, 13 aa, BK virus
IGITSMLNLHAGS

SEQ ID NO: 25316 - protein, 13 aa, BK virus
GITSMLNLHAGSQ

SEQ ID NO: 25317 - protein, 13 aa, BK virus
ITSMLNLHAGSQK

SEQ ID NO: 25318 - protein, 13 aa, BK virus
TSMLNLHAGSQKV

SEQ ID NO: 25319 - protein, 13 aa, BK virus
SMLNLHAGSQKVH

SEQ ID NO: 25320 - protein, 13 aa, BK virus
MLNLHAGSQKVHE

SEQ ID NO: 25321 - protein, 13 aa, BK virus
LNLHAGSQKVHEH

SEQ ID NO: 25322 - protein, 13 aa, BK virus
NLHAGSQKVHEHG

SEQ ID NO: 25323 - protein, 13 aa, BK virus
LHAGSQKVHEHGG

SEQ ID NO: 25324 - protein, 13 aa, BK virus
HAGSQKVHEHGGG

SEQ ID NO: 25325 - protein, 13 aa, BK virus
AGSQKVHEHGGGK

SEQ ID NO: 25326 - protein, 13 aa, BK virus
GSQKVHEHGGGKP

SEQ ID NO: 25327 - protein, 13 aa, BK virus
SQKVHEHGGGKPI

SEQ ID NO: 25328 - protein, 13 aa, BK virus
QKVHEHGGGKPIQ

SEQ ID NO: 25329 - protein, 13 aa, BK virus
KVHEHGGGKPIQG

SEQ ID NO: 25330 - protein, 13 aa, BK virus
VHEHGGGKPIQGS

SEQ ID NO: 25331 - protein, 13 aa, BK virus
HEHGGGKPIQGSN

SEQ ID NO: 25332 - protein, 13 aa, BK virus
EHGGGKPIQGSNF

SEQ ID NO: 25333 - protein, 13 aa, BK virus
HGGGKPIQGSNFH

SEQ ID NO: 25334 - protein, 13 aa, BK virus
GGGKPIQGSNFHF

SEQ ID NO: 25335 - protein, 13 aa, BK virus
GGKPIQGSNFHFF

SEQ ID NO: 25336 - protein, 13 aa, BK virus
GKPIQGSNFHFFA

SEQ ID NO: 25337 - protein, 13 aa, BK virus
KPIQGSNFHFFAV

SEQ ID NO: 25338 - protein, 13 aa, BK virus
PIQGSNFHFFAVG

SEQ ID NO: 25339 - protein, 13 aa, BK virus
IQGSNFHFFAVGG

SEQ ID NO: 25340 - protein, 13 aa, BK virus
QGSNFHFFAVGGE

SEQ ID NO: 25341 - protein, 13 aa, BK virus
GSNFHFFAVGGEP

SEQ ID NO: 25342 - protein, 13 aa, BK virus
SNFHFFAVGGEPL

SEQ ID NO: 25343 - protein, 13 aa, BK virus
NFHFFAVGGEPLE

SEQ ID NO: 25344 - protein, 13 aa, BK virus
FHFFAVGGEPLEM

SEQ ID NO: 25345 - protein, 13 aa, BK virus
HFFAVGGEPLEMQ

SEQ ID NO: 25346 - protein, 13 aa, BK virus
FFAVGGEPLEMQG

SEQ ID NO: 25347 - protein, 13 aa, BK virus
FAVGGEPLEMQGV

SEQ ID NO: 25348 - protein, 13 aa, BK virus
AVGGEPLEMQGVL

SEQ ID NO: 25349 - protein, 13 aa, BK virus
VGGEPLEMQGVLM

SEQ ID NO: 25350 - protein, 13 aa, BK virus
GGEPLEMQGVLMN

SEQ ID NO: 25351 - protein, 13 aa, BK virus
GEPLEMQGVLMNY

SEQ ID NO: 25352 - protein, 13 aa, BK virus
EPLEMQGVLMNYR

SEQ ID NO: 25353 - protein, 13 aa, BK virus
PLEMQGVLMNYRS

SEQ ID NO: 25354 - protein, 13 aa, BK virus
LEMQGVLMNYRSK

SEQ ID NO: 25355 - protein, 13 aa, BK virus
EMQGVLMNYRSKY

SEQ ID NO: 25356 - protein, 13 aa, BK virus
MQGVLMNYRSKYP

SEQ ID NO: 25357 - protein, 13 aa, BK virus
QGVLMNYRSKYPD

SEQ ID NO: 25358 - protein, 13 aa, BK virus
GVLMNYRSKYPDG

SEQ ID NO: 25359 - protein, 13 aa, BK virus
VLMNYRSKYPDGT

SEQ ID NO: 25360 - protein, 13 aa, BK virus
LMNYRSKYPDGTI

SEQ ID NO: 25361 - protein, 13 aa, BK virus
MNYRSKYPDGTIT

SEQ ID NO: 25362 - protein, 13 aa, BK virus
NYRSKYPDGTITP

SEQ ID NO: 25363 - protein, 13 aa, BK virus
YRSKYPDGTITPK

SEQ ID NO: 25364 - protein, 13 aa, BK virus
RSKYPDGTITPKN

SEQ ID NO: 25365 - protein, 13 aa, BK virus
SKYPDGTITPKNP

SEQ ID NO: 25366 - protein, 13 aa, BK virus
KYPDGTITPKNPT

SEQ ID NO: 25367 - protein, 13 aa, BK virus
YPDGTITPKNPTA

SEQ ID NO: 25368 - protein, 13 aa, BK virus
PDGTITPKNPTAQ

SEQ ID NO: 25369 - protein, 13 aa, BK virus
DGTITPKNPTAQS

SEQ ID NO: 25370 - protein, 13 aa, BK virus
GTITPKNPTAQSQ

SEQ ID NO: 25371 - protein, 13 aa, BK virus
TITPKNPTAQSQV

SEQ ID NO: 25372 - protein, 13 aa, BK virus
ITPKNPTAQSQVM

SEQ ID NO: 25373 - protein, 13 aa, BK virus
TPKNPTAQSQVMN

SEQ ID NO: 25374 - protein, 13 aa, BK virus
PKNPTAQSQVMNT

SEQ ID NO: 25375 - protein, 13 aa, BK virus
KNPTAQSQVMNTD

SEQ ID NO: 25376 - protein, 13 aa, BK virus
NPTAQSQVMNTDH

SEQ ID NO: 25377 - protein, 13 aa, BK virus
PTAQSQVMNTDHK

SEQ ID NO: 25378 - protein, 13 aa, BK virus
TAQSQVMNTDHKA

SEQ ID NO: 25379 - protein, 13 aa, BK virus
AQSQVMNTDHKAY

SEQ ID NO: 25380 - protein, 13 aa, BK virus
QSQVMNTDHKAYL

SEQ ID NO: 25381 - protein, 13 aa, BK virus
SQVMNTDHKAYLD

SEQ ID NO: 25382 - protein, 13 aa, BK virus
QVMNTDHKAYLDK

SEQ ID NO: 25383 - protein, 13 aa, BK virus
VMNTDHKAYLDKN

SEQ ID NO: 25384 - protein, 13 aa, BK virus
MNTDHKAYLDKNN

SEQ ID NO: 25385 - protein, 13 aa, BK virus
NTDHKAYLDKNNA

SEQ ID NO: 25386 - protein, 13 aa, BK virus
TDHKAYLDKNNAY

SEQ ID NO: 25387 - protein, 13 aa, BK virus
DHKAYLDKNNAYP

SEQ ID NO: 25388 - protein, 13 aa, BK virus
HKAYLDKNNAYPV

SEQ ID NO: 25389 - protein, 13 aa, BK virus
KAYLDKNNAYPVE

SEQ ID NO: 25390 - protein, 13 aa, BK virus
AYLDKNNAYPVEC

SEQ ID NO: 25391 - protein, 13 aa, BK virus
YLDKNNAYPVECW

SEQ ID NO: 25392 - protein, 13 aa, BK virus
LDKNNAYPVECWV

SEQ ID NO: 25393 - protein, 13 aa, BK virus
DKNNAYPVECWVP

SEQ ID NO: 25394 - protein, 13 aa, BK virus
KNNAYPVECWVPD

SEQ ID NO: 25395 - protein, 13 aa, BK virus
NNAYPVECWVPDP

SEQ ID NO: 25396 - protein, 13 aa, BK virus
NAYPVECWVPDPS

SEQ ID NO: 25397 - protein, 13 aa, BK virus
AYPVECWVPDPSR

SEQ ID NO: 25398 - protein, 13 aa, BK virus
YPVECWVPDPSRN

SEQ ID NO: 25399 - protein, 13 aa, BK virus
PVECWVPDPSRNE

SEQ ID NO: 25400 - protein, 13 aa, BK virus
VECWVPDPSRNEN

SEQ ID NO: 25401 - protein, 13 aa, BK virus
ECWVPDPSRNENA

SEQ ID NO: 25402 - protein, 13 aa, BK virus
CWVPDPSRNENAR

SEQ ID NO: 25403 - protein, 13 aa, BK virus
WVPDPSRNENARY

SEQ ID NO: 25404 - protein, 13 aa, BK virus
VPDPSRNENARYF

SEQ ID NO: 25405 - protein, 13 aa, BK virus
PDPSRNENARYFG

SEQ ID NO: 25406 - protein, 13 aa, BK virus
DPSRNENARYFGT

SEQ ID NO: 25407 - protein, 13 aa, BK virus
PSRNENARYFGTF

SEQ ID NO: 25408 - protein, 13 aa, BK virus
SRNENARYFGTFT

SEQ ID NO: 25409 - protein, 13 aa, BK virus
RNENARYFGTFTG

SEQ ID NO: 25410 - protein, 13 aa, BK virus
NENARYFGTFTGG

SEQ ID NO: 25411 - protein, 13 aa, BK virus
ENARYFGTFTGGE

SEQ ID NO: 25412 - protein, 13 aa, BK virus
NARYFGTFTGGEN

SEQ ID NO: 25413 - protein, 13 aa, BK virus
ARYFGTFTGGENV

SEQ ID NO: 25414 - protein, 13 aa, BK virus
RYFGTFTGGENVP

SEQ ID NO: 25415 - protein, 13 aa, BK virus
YFGTFTGGENVPP

SEQ ID NO: 25416 - protein, 13 aa, BK virus
FGTFTGGENVPPV

SEQ ID NO: 25417 - protein, 13 aa, BK virus
GTFTGGENVPPVL

SEQ ID NO: 25418 - protein, 13 aa, BK virus
TFTGGENVPPVLH

SEQ ID NO: 25419 - protein, 13 aa, BK virus
FTGGENVPPVLHV

SEQ ID NO: 25420 - protein, 13 aa, BK virus
TGGENVPPVLHVT

SEQ ID NO: 25421 - protein, 13 aa, BK virus
GGENVPPVLHVTN

SEQ ID NO: 25422 - protein, 13 aa, BK virus
GENVPPVLHVTNT

SEQ ID NO: 25423 - protein, 13 aa, BK virus
ENVPPVLHVTNTA

SEQ ID NO: 25424 - protein, 13 aa, BK virus
NVPPVLHVTNTAT

SEQ ID NO: 25425 - protein, 13 aa, BK virus
VPPVLHVTNTATT

SEQ ID NO: 25426 - protein, 13 aa, BK virus
PPVLHVTNTATTV

SEQ ID NO: 25427 - protein, 13 aa, BK virus
PVLHVTNTATTVL

SEQ ID NO: 25428 - protein, 13 aa, BK virus
VLHVTNTATTVLL

SEQ ID NO: 25429 - protein, 13 aa, BK virus
LHVTNTATTVLLD

SEQ ID NO: 25430 - protein, 13 aa, BK virus
HVTNTATTVLLDE

SEQ ID NO: 25431 - protein, 13 aa, BK virus
VTNTATTVLLDEQ

SEQ ID NO: 25432 - protein, 13 aa, BK virus
TNTATTVLLDEQG

SEQ ID NO: 25433 - protein, 13 aa, BK virus
NTATTVLLDEQGV

SEQ ID NO: 25434 - protein, 13 aa, BK virus
TATTVLLDEQGVG

SEQ ID NO: 25435 - protein, 13 aa, BK virus
ATTVLLDEQGVGP

SEQ ID NO: 25436 - protein, 13 aa, BK virus
TTVLLDEQGVGPL

SEQ ID NO: 25437 - protein, 13 aa, BK virus
TVLLDEQGVGPLC

SEQ ID NO: 25438 - protein, 13 aa, BK virus
VLLDEQGVGPLCK

SEQ ID NO: 25439 - protein, 13 aa, BK virus
LLDEQGVGPLCKA

SEQ ID NO: 25440 - protein, 13 aa, BK virus
LDEQGVGPLCKAD

SEQ ID NO: 25441 - protein, 13 aa, BK virus
DEQGVGPLCKADS

SEQ ID NO: 25442 - protein, 13 aa, BK virus
EQGVGPLCKADSL

SEQ ID NO: 25443 - protein, 13 aa, BK virus
QGVGPLCKADSLY

SEQ ID NO: 25444 - protein, 13 aa, BK virus
GVGPLCKADSLYV

SEQ ID NO: 25445 - protein, 13 aa, BK virus
VGPLCKADSLYVS

SEQ ID NO: 25446 - protein, 13 aa, BK virus
GPLCKADSLYVSA

SEQ ID NO: 25447 - protein, 13 aa, BK virus
PLCKADSLYVSAA

SEQ ID NO: 25448 - protein, 13 aa, BK virus
LCKADSLYVSAAD

SEQ ID NO: 25449 - protein, 13 aa, BK virus
CKADSLYVSAADI

SEQ ID NO: 25450 - protein, 13 aa, BK virus
KADSLYVSAADIC

SEQ ID NO: 25451 - protein, 13 aa, BK virus
ADSLYVSAADICG

SEQ ID NO: 25452 - protein, 13 aa, BK virus
DSLYVSAADICGL

SEQ ID NO: 25453 - protein, 13 aa, BK virus
SLYVSAADICGLF

SEQ ID NO: 25454 - protein, 13 aa, BK virus
LYVSAADICGLFT

SEQ ID NO: 25455 - protein, 13 aa, BK virus
YVSAADICGLFTN

SEQ ID NO: 25456 - protein, 13 aa, BK virus
VSAADICGLFTNS

SEQ ID NO: 25457 - protein, 13 aa, BK virus
SAADICGLFTNSS

SEQ ID NO: 25458 - protein, 13 aa, BK virus
AADICGLFTNSSG

SEQ ID NO: 25459 - protein, 13 aa, BK virus
ADICGLFTNSSGT

SEQ ID NO: 25460 - protein, 13 aa, BK virus
DICGLFTNSSGTQ

SEQ ID NO: 25461 - protein, 13 aa, BK virus
ICGLFTNSSGTQQ

SEQ ID NO: 25462 - protein, 13 aa, BK virus
CGLFTNSSGTQQW

SEQ ID NO: 25463 - protein, 13 aa, BK virus
GLFTNSSGTQQWR

SEQ ID NO: 25464 - protein, 13 aa, BK virus
LFTNSSGTQQWRG

SEQ ID NO: 25465 - protein, 13 aa, BK virus
FTNSSGTQQWRGL

SEQ ID NO: 25466 - protein, 13 aa, BK virus
TNSSGTQQWRGLA

SEQ ID NO: 25467 - protein, 13 aa, BK virus
NSSGTQQWRGLAR

SEQ ID NO: 25468 - protein, 13 aa, BK virus
SSGTQQWRGLARY

SEQ ID NO: 25469 - protein, 13 aa, BK virus
SGTQQWRGLARYF

SEQ ID NO: 25470 - protein, 13 aa, BK virus
GTQQWRGLARYFK

SEQ ID NO: 25471 - protein, 13 aa, BK virus
TQQWRGLARYFKI

SEQ ID NO: 25472 - protein, 13 aa, BK virus
QQWRGLARYFKIR

SEQ ID NO: 25473 - protein, 13 aa, BK virus
QWRGLARYFKIRL

SEQ ID NO: 25474 - protein, 13 aa, BK virus
WRGLARYFKIRLR

SEQ ID NO: 25475 - protein, 13 aa, BK virus
RGLARYFKIRLRK

SEQ ID NO: 25476 - protein, 13 aa, BK virus
GLARYFKIRLRKR

SEQ ID NO: 25477 - protein, 13 aa, BK virus
LARYFKIRLRKRS

SEQ ID NO: 25478 - protein, 13 aa, BK virus
ARYFKIRLRKRSV

SEQ ID NO: 25479 - protein, 13 aa, BK virus
RYFKIRLRKRSVK

SEQ ID NO: 25480 - protein, 13 aa, BK virus
YFKIRLRKRSVKN

SEQ ID NO: 25481 - protein, 13 aa, BK virus
FKIRLRKRSVKNP

SEQ ID NO: 25482 - protein, 13 aa, BK virus
KIRLRKRSVKNPY

SEQ ID NO: 25483 - protein, 13 aa, BK virus
IRLRKRSVKNPYP

SEQ ID NO: 25484 - protein, 13 aa, BK virus
RLRKRSVKNPYPI

SEQ ID NO: 25485 - protein, 13 aa, BK virus
LRKRSVKNPYPIS

SEQ ID NO: 25486 - protein, 13 aa, BK virus
RKRSVKNPYPISF

SEQ ID NO: 25487 - protein, 13 aa, BK virus
KRSVKNPYPISFL

SEQ ID NO: 25488 - protein, 13 aa, BK virus
RSVKNPYPISFLL

SEQ ID NO: 25489 - protein, 13 aa, BK virus
SVKNPYPISFLLS

SEQ ID NO: 25490 - protein, 13 aa, BK virus
VKNPYPISFLLSD

SEQ ID NO: 25491 - protein, 13 aa, BK virus
KNPYPISFLLSDL

SEQ ID NO: 25492 - protein, 13 aa, BK virus
NPYPISFLLSDLI

SEQ ID NO: 25493 - protein, 13 aa, BK virus
PYPISFLLSDLIN

SEQ ID NO: 25494 - protein, 13 aa, BK virus
YPISFLLSDLINR

SEQ ID NO: 25495 - protein, 13 aa, BK virus
PISFLLSDLINRR

SEQ ID NO: 25496 - protein, 13 aa, BK virus
ISFLLSDLINRRT

SEQ ID NO: 25497 - protein, 13 aa, BK virus
SFLLSDLINRRTQ

SEQ ID NO: 25498 - protein, 13 aa, BK virus
FLLSDLINRRTQR

SEQ ID NO: 25499 - protein, 13 aa, BK virus
LLSDLINRRTQRV

SEQ ID NO: 25500 - protein, 13 aa, BK virus
LSDLINRRTQRVD

SEQ ID NO: 25501 - protein, 13 aa, BK virus
SDLINRRTQRVDG

SEQ ID NO: 25502 - protein, 13 aa, BK virus
DLINRRTQRVDGQ

SEQ ID NO: 25503 - protein, 13 aa, BK virus
LINRRTQRVDGQP

SEQ ID NO: 25504 - protein, 13 aa, BK virus
INRRTQRVDGQPM

SEQ ID NO: 25505 - protein, 13 aa, BK virus
NRRTQRVDGQPMY

SEQ ID NO: 25506 - protein, 13 aa, BK virus
RRTQRVDGQPMYG

SEQ ID NO: 25507 - protein, 13 aa, BK virus
RTQRVDGQPMYGM

SEQ ID NO: 25508 - protein, 13 aa, BK virus
TQRVDGQPMYGME

SEQ ID NO: 25509 - protein, 13 aa, BK virus
QRVDGQPMYGMES

SEQ ID NO: 25510 - protein, 13 aa, BK virus
RVDGQPMYGMESQ

SEQ ID NO: 25511 - protein, 13 aa, BK virus
VDGQPMYGMESQV

SEQ ID NO: 25512 - protein, 13 aa, BK virus
DGQPMYGMESQVE

SEQ ID NO: 25513 - protein, 13 aa, BK virus
GQPMYGMESQVEE

SEQ ID NO: 25514 - protein, 13 aa, BK virus
QPMYGMESQVEEV

SEQ ID NO: 25515 - protein, 13 aa, BK virus
PMYGMESQVEEVR

SEQ ID NO: 25516 - protein, 13 aa, BK virus
MYGMESQVEEVRV

SEQ ID NO: 25517 - protein, 13 aa, BK virus
YGMESQVEEVRVF

SEQ ID NO: 25518 - protein, 13 aa, BK virus
GMESQVEEVRVFD

SEQ ID NO: 25519 - protein, 13 aa, BK virus
MESQVEEVRVFDG

SEQ ID NO: 25520 - protein, 13 aa, BK virus
ESQVEEVRVFDGT

SEQ ID NO: 25521 - protein, 13 aa, BK virus
SQVEEVRVFDGTE

SEQ ID NO: 25522 - protein, 13 aa, BK virus
QVEEVRVFDGTER

SEQ ID NO: 25523 - protein, 13 aa, BK virus
VEEVRVFDGTERL

SEQ ID NO: 25524 - protein, 13 aa, BK virus
EEVRVFDGTERLP

SEQ ID NO: 25525 - protein, 13 aa, BK virus
EVRVFDGTERLPG

SEQ ID NO: 25526 - protein, 13 aa, BK virus
VRVFDGTERLPGD

SEQ ID NO: 25527 - protein, 13 aa, BK virus
RVFDGTERLPGDP

SEQ ID NO: 25528 - protein, 13 aa, BK virus
VFDGTERLPGDPD

SEQ ID NO: 25529 - protein, 13 aa, BK virus
FDGTERLPGDPDM

SEQ ID NO: 25530 - protein, 13 aa, BK virus
DGTERLPGDPDMI

SEQ ID NO: 25531 - protein, 13 aa, BK virus
GTERLPGDPDMIR

SEQ ID NO: 25532 - protein, 13 aa, BK virus
TERLPGDPDMIRY

SEQ ID NO: 25533 - protein, 13 aa, BK virus
ERLPGDPDMIRYI

SEQ ID NO: 25534 - protein, 13 aa, BK virus
RLPGDPDMIRYID

SEQ ID NO: 25535 - protein, 13 aa, BK virus
LPGDPDMIRYIDK

SEQ ID NO: 25536 - protein, 13 aa, BK virus
PGDPDMIRYIDKQ

SEQ ID NO: 25537 - protein, 13 aa, BK virus
GDPDMIRYIDKQG

SEQ ID NO: 25538 - protein, 13 aa, BK virus
DPDMIRYIDKQGQ

SEQ ID NO: 25539 - protein, 13 aa, BK virus
PDMIRYIDKQGQL

SEQ ID NO: 25540 - protein, 13 aa, BK virus
DMIRYIDKQGQLQ

SEQ ID NO: 25541 - protein, 13 aa, BK virus
MIRYIDKQGQLQT

SEQ ID NO: 25542 - protein, 13 aa, BK virus
IRYIDKQGQLQTK

SEQ ID NO: 25543 - protein, 13 aa, BK virus
RYIDKQGQLQTKM

SEQ ID NO: 25544 - protein, 13 aa, BK virus
YIDKQGQLQTKML

SEQ ID NO: 25545 - protein, 13 aa, BK virus
TGAFIVHIHLINA

SEQ ID NO: 25546 - protein, 13 aa, BK virus
GAFIVHIHLINAA

SEQ ID NO: 25547 - protein, 13 aa, BK virus
AFIVHIHLINAAF

SEQ ID NO: 25548 - protein, 13 aa, BK virus
FIVHIHLINAAFV

SEQ ID NO: 25549 - protein, 13 aa, BK virus
ATFKLVLFWGWCF

SEQ ID NO: 25550 - protein, 13 aa, BK virus
TFKLVLFWGWCFR

SEQ ID NO: 25551 - protein, 13 aa, BK virus
FKLVLFWGWCFRP

SEQ ID NO: 25552 - protein, 13 aa, BK virus
KLVLFWGWCFRPF

SEQ ID NO: 25553 - protein, 13 aa, BK virus
LVLFWGWCFRPFK

SEQ ID NO: 25554 - protein, 13 aa, BK virus
VLFWGWCFRPFKT

SEQ ID NO: 25555 - protein, 13 aa, BK virus
LFWGWCFRPFKTL

SEQ ID NO: 25556 - protein, 13 aa, BK virus
FWGWCFRPFKTLK

SEQ ID NO: 25557 - protein, 13 aa, BK virus
WGWCFRPFKTLKA

SEQ ID NO: 25558 - protein, 13 aa, BK virus
GWCFRPFKTLKAF

SEQ ID NO: 25559 - protein, 13 aa, BK virus
WCFRPFKTLKAFT

SEQ ID NO: 25560 - protein, 13 aa, BK virus
CFRPFKTLKAFTQ

SEQ ID NO: 25561 - protein, 13 aa, BK virus
FRPFKTLKAFTQM

SEQ ID NO: 25562 - protein, 13 aa, BK virus
RPFKTLKAFTQMQ

SEQ ID NO: 25563 - protein, 13 aa, BK virus
PFKTLKAFTQMQL

SEQ ID NO: 25564 - protein, 13 aa, BK virus
FKTLKAFTQMQLL

SEQ ID NO: 25565 - protein, 13 aa, BK virus
KTLKAFTQMQLLT

SEQ ID NO: 25566 - protein, 13 aa, BK virus
TLKAFTQMQLLTM

SEQ ID NO: 25567 - protein, 13 aa, BK virus
LKAFTQMQLLTMG

SEQ ID NO: 25568 - protein, 13 aa, BK virus
KAFTQMQLLTMGV

SEQ ID NO: 25569 - protein, 13 aa, BK virus
ILFSCNIKNTFPH

SEQ ID NO: 25570 - protein, 13 aa, BK virus
LFSCNIKNTFPHA

SEQ ID NO: 25571 - protein, 13 aa, BK virus
FSCNIKNTFPHAY

SEQ ID NO: 25572 - protein, 13 aa, BK virus
SCNIKNTFPHAYI

SEQ ID NO: 25573 - protein, 13 aa, BK virus
CNIKNTFPHAYII

SEQ ID NO: 25574 - protein, 13 aa, BK virus
NIKNTFPHAYIIF

SEQ ID NO: 25575 - protein, 13 aa, BK virus
IKNTFPHAYIIFH

SEQ ID NO: 25576 - protein, 13 aa, BK virus
KNTFPHAYIIFHP

SEQ ID NO: 25577 - protein, 13 aa, BK virus
KSIHTYLRIQPFL

SEQ ID NO: 25578 - protein, 13 aa, BK virus
SIHTYLRIQPFLP

SEQ ID NO: 25579 - protein, 13 aa, BK virus
IHTYLRIQPFLPF

SEQ ID NO: 25580 - protein, 13 aa, BK virus
HTYLRIQPFLPFN

SEQ ID NO: 25581 - protein, 13 aa, BK virus
TYLRIQPFLPFNN

SEQ ID NO: 25582 - protein, 13 aa, BK virus
YLRIQPFLPFNNS

SEQ ID NO: 25583 - protein, 13 aa, BK virus
LRIQPFLPFNNSR

SEQ ID NO: 25584 - protein, 13 aa, BK virus
RIQPFLPFNNSRL

SEQ ID NO: 25585 - protein, 13 aa, BK virus
IQPFLPFNNSRLY

SEQ ID NO: 25586 - protein, 13 aa, BK virus
QPFLPFNNSRLYI

SEQ ID NO: 25587 - protein, 13 aa, BK virus
PFLPFNNSRLYIS

SEQ ID NO: 25588 - protein, 13 aa, BK virus
FLPFNNSRLYISC

SEQ ID NO: 25589 - protein, 13 aa, BK virus
LPFNNSRLYISCK

SEQ ID NO: 25590 - protein, 13 aa, BK virus
PFNNSRLYISCKI

SEQ ID NO: 25591 - protein, 13 aa, BK virus
FNNSRLYISCKIS

SEQ ID NO: 25592 - protein, 13 aa, BK virus
NNSRLYISCKISY

SEQ ID NO: 25593 - protein, 13 aa, BK virus
NSRLYISCKISYR

SEQ ID NO: 25594 - protein, 13 aa, BK virus
SRLYISCKISYRP

SEQ ID NO: 25595 - protein, 13 aa, BK virus
RLYISCKISYRPK

SEQ ID NO: 25596 - protein, 13 aa, BK virus
LYISCKISYRPKP

SEQ ID NO: 25597 - protein, 13 aa, BK virus
YISCKISYRPKPN

SEQ ID NO: 25598 - protein, 13 aa, BK virus
IYFGPKIYLSYKS

SEQ ID NO: 25599 - protein, 13 aa, BK virus
YFGPKIYLSYKSS

SEQ ID NO: 25600 - protein, 13 aa, BK virus
FGPKIYLSYKSSL

SEQ ID NO: 25601 - protein, 13 aa, BK virus
GPKIYLSYKSSLQ

SEQ ID NO: 25602 - protein, 13 aa, BK virus
PKIYLSYKSSLQG

SEQ ID NO: 25603 - protein, 13 aa, BK virus
KIYLSYKSSLQGF

SEQ ID NO: 25604 - protein, 13 aa, BK virus
IYLSYKSSLQGFR

SEQ ID NO: 25605 - protein, 13 aa, BK virus
YLSYKSSLQGFRD

SEQ ID NO: 25606 - protein, 13 aa, BK virus
LSYKSSLQGFRDR

SEQ ID NO: 25607 - protein, 13 aa, BK virus
SYKSSLQGFRDRI

SEQ ID NO: 25608 - protein, 13 aa, BK virus
YKSSLQGFRDRIL

SEQ ID NO: 25609 - protein, 13 aa, BK virus
KSSLQGFRDRILI

SEQ ID NO: 25610 - protein, 13 aa, BK virus
SSLQGFRDRILIH

SEQ ID NO: 25611 - protein, 13 aa, BK virus
SLQGFRDRILIHC

SEQ ID NO: 25612 - protein, 13 aa, BK virus
LQGFRDRILIHCN

SEQ ID NO: 25613 - protein, 13 aa, BK virus
QGFRDRILIHCNQ

SEQ ID NO: 25614 - protein, 13 aa, BK virus
GFRDRILIHCNQA

SEQ ID NO: 25615 - protein, 13 aa, BK virus
FRDRILIHCNQAW

SEQ ID NO: 25616 - protein, 13 aa, BK virus
RDRILIHCNQAWW

SEQ ID NO: 25617 - protein, 13 aa, BK virus
DRILIHCNQAWWK

SEQ ID NO: 25618 - protein, 13 aa, BK virus
RILIHCNQAWWKY

SEQ ID NO: 25619 - protein, 13 aa, BK virus
ILIHCNQAWWKYL

SEQ ID NO: 25620 - protein, 13 aa, BK virus
LIHCNQAWWKYLG

SEQ ID NO: 25621 - protein, 13 aa, BK virus
IHCNQAWWKYLGS

SEQ ID NO: 25622 - protein, 13 aa, BK virus
HCNQAWWKYLGSF

SEQ ID NO: 25623 - protein, 13 aa, BK virus
CNQAWWKYLGSFV

SEQ ID NO: 25624 - protein, 13 aa, BK virus
FSSCPFYIFKNNH

SEQ ID NO: 25625 - protein, 13 aa, BK virus
SSCPFYIFKNNHV

SEQ ID NO: 25626 - protein, 13 aa, BK virus
SCPFYIFKNNHVL

SEQ ID NO: 25627 - protein, 13 aa, BK virus
CPFYIFKNNHVLI

SEQ ID NO: 25628 - protein, 13 aa, BK virus
PFYIFKNNHVLIY

SEQ ID NO: 25629 - protein, 13 aa, BK virus
FYIFKNNHVLIYS

SEQ ID NO: 25630 - protein, 13 aa, BK virus
YIFKNNHVLIYSY

SEQ ID NO: 25631 - protein, 13 aa, BK virus
IFKNNHVLIYSYT

SEQ ID NO: 25632 - protein, 13 aa, BK virus
PVSSFRYIENNTV

SEQ ID NO: 25633 - protein, 13 aa, BK virus
VSSFRYIENNTVQ

SEQ ID NO: 25634 - protein, 13 aa, BK virus
SSFRYIENNTVQK

SEQ ID NO: 25635 - protein, 13 aa, BK virus
SFRYIENNTVQKI

SEQ ID NO: 25636 - protein, 13 aa, BK virus
FRYIENNTVQKIK

SEQ ID NO: 25637 - protein, 13 aa, BK virus
RYIENNTVQKIKY

SEQ ID NO: 25638 - protein, 13 aa, BK virus
YIENNTVQKIKYY

SEQ ID NO: 25639 - protein, 13 aa, BK virus
IENNTVQKIKYYR

SEQ ID NO: 25640 - protein, 13 aa, BK virus
ENNTVQKIKYYRI

SEQ ID NO: 25641 - protein, 13 aa, BK virus
NNTVQKIKYYRIH

SEQ ID NO: 25642 - protein, 13 aa, BK virus
NTVQKIKYYRIHF

SEQ ID NO: 25643 - protein, 13 aa, BK virus
TVQKIKYYRIHFR

SEQ ID NO: 25644 - protein, 13 aa, BK virus
QTVQPSNTCHILF

SEQ ID NO: 25645 - protein, 13 aa, BK virus
HFFPGHMKGIYSF

SEQ ID NO: 25646 - protein, 13 aa, BK virus
FFPGHMKGIYSFF

SEQ ID NO: 25647 - protein, 13 aa, BK virus
FPGHMKGIYSFFS

SEQ ID NO: 25648 - protein, 13 aa, BK virus
NCIYCLLTNTFLI

SEQ ID NO: 25649 - protein, 13 aa, BK virus
CIYCLLTNTFLIF

SEQ ID NO: 25650 - protein, 13 aa, BK virus
IYCLLTNTFLIFT

SEQ ID NO: 25651 - protein, 13 aa, BK virus
YCLLTNTFLIFTF

SEQ ID NO: 25652 - protein, 13 aa, BK virus
CLLTNTFLIFTFC

SEQ ID NO: 25653 - protein, 13 aa, BK virus
LLTNTFLIFTFCK

SEQ ID NO: 25654 - protein, 13 aa, BK virus
LTNTFLIFTFCKN

SEQ ID NO: 25655 - protein, 13 aa, BK virus
TNTFLIFTFCKNN

SEQ ID NO: 25656 - protein, 13 aa, BK virus
NTFLIFTFCKNNS

SEQ ID NO: 25657 - protein, 13 aa, BK virus
TFLIFTFCKNNSI

SEQ ID NO: 25658 - protein, 13 aa, BK virus
FLIFTFCKNNSIC

SEQ ID NO: 25659 - protein, 13 aa, BK virus
LIFTFCKNNSICK

SEQ ID NO: 25660 - protein, 13 aa, BK virus
IFTFCKNNSICKV

SEQ ID NO: 25661 - protein, 13 aa, BK virus
FTFCKNNSICKVL

SEQ ID NO: 25662 - protein, 13 aa, BK virus
TFCKNNSICKVLF

SEQ ID NO: 25663 - protein, 13 aa, BK virus
FCKNNSICKVLFM

SEQ ID NO: 25664 - protein, 13 aa, BK virus
CKNNSICKVLFMI

SEQ ID NO: 25665 - protein, 13 aa, BK virus
KNNSICKVLFMIL

SEQ ID NO: 25666 - protein, 13 aa, BK virus
NNSICKVLFMILK

SEQ ID NO: 25667 - protein, 13 aa, BK virus
NSICKVLFMILKV

SEQ ID NO: 25668 - protein, 13 aa, BK virus
SICKVLFMILKVI

SEQ ID NO: 25669 - protein, 13 aa, BK virus
ICKVLFMILKVIR

SEQ ID NO: 25670 - protein, 13 aa, BK virus
CKVLFMILKVIRL

SEQ ID NO: 25671 - protein, 13 aa, BK virus
KVLFMILKVIRLV

SEQ ID NO: 25672 - protein, 13 aa, BK virus
VLFMILKVIRLVF

SEQ ID NO: 25673 - protein, 13 aa, BK virus
LFMILKVIRLVFF

SEQ ID NO: 25674 - protein, 13 aa, BK virus
FMILKVIRLVFFL

SEQ ID NO: 25675 - protein, 13 aa, BK virus
MILKVIRLVFFLT

SEQ ID NO: 25676 - protein, 13 aa, BK virus
ILKVIRLVFFLTL

SEQ ID NO: 25677 - protein, 13 aa, BK virus
LKVIRLVFFLTLF

SEQ ID NO: 25678 - protein, 13 aa, BK virus
KVIRLVFFLTLFT

SEQ ID NO: 25679 - protein, 13 aa, BK virus
VIRLVFFLTLFTL

SEQ ID NO: 25680 - protein, 13 aa, BK virus
IRLVFFLTLFTLL

SEQ ID NO: 25681 - protein, 13 aa, BK virus
RLVFFLTLFTLLY

SEQ ID NO: 25682 - protein, 13 aa, BK virus
LVFFLTLFTLLYI

SEQ ID NO: 25683 - protein, 13 aa, BK virus
VFFLTLFTLLYIV

SEQ ID NO: 25684 - protein, 13 aa, BK virus
FFLTLFTLLYIVL

SEQ ID NO: 25685 - protein, 13 aa, BK virus
FLTLFTLLYIVLK

SEQ ID NO: 25686 - protein, 13 aa, BK virus
LTLFTLLYIVLKF

SEQ ID NO: 25687 - protein, 13 aa, BK virus
KHILTLCLYCILS

SEQ ID NO: 25688 - protein, 13 aa, BK virus
HILTLCLYCILSN

SEQ ID NO: 25689 - protein, 13 aa, BK virus
FPRHLLCFFRLFW

SEQ ID NO: 25690 - protein, 13 aa, BK virus
PRHLLCFFRLFWA

SEQ ID NO: 25691 - protein, 13 aa, BK virus
RHLLCFFRLFWAK

SEQ ID NO: 25692 - protein, 13 aa, BK virus
HLLCFFRLFWAKI

SEQ ID NO: 25693 - protein, 13 aa, BK virus
LLCFFRLFWAKIM

SEQ ID NO: 25694 - protein, 13 aa, BK virus
LCFFRLFWAKIML

SEQ ID NO: 25695 - protein, 13 aa, BK virus
CFFRLFWAKIMLL

SEQ ID NO: 25696 - protein, 13 aa, BK virus
APLNAFFYSMVWI

SEQ ID NO: 25697 - protein, 13 aa, BK virus
PLNAFFYSMVWIS

SEQ ID NO: 25698 - protein, 13 aa, BK virus
LNAFFYSMVWISS

SEQ ID NO: 25699 - protein, 13 aa, BK virus
KTKGTQLLTEIIN

SEQ ID NO: 25700 - protein, 13 aa, BK virus
TKGTQLLTEIINC

SEQ ID NO: 25701 - protein, 13 aa, BK virus
KGTQLLTEIINCR

SEQ ID NO: 25702 - protein, 13 aa, BK virus
GTQLLTEIINCRN

SEQ ID NO: 25703 - protein, 13 aa, BK virus
TQLLTEIINCRNS

SEQ ID NO: 25704 - protein, 13 aa, BK virus
QLLTEIINCRNSM

SEQ ID NO: 25705 - protein, 13 aa, BK virus
LLTEIINCRNSMS

SEQ ID NO: 25706 - protein, 13 aa, BK virus
LTEIINCRNSMSM

SEQ ID NO: 25707 - protein, 13 aa, BK virus
TEIINCRNSMSMW

SEQ ID NO: 25708 - protein, 13 aa, BK virus
EIINCRNSMSMWS

SEQ ID NO: 25709 - protein, 13 aa, BK virus
KEYNIMPSTHVST

SEQ ID NO: 25710 - protein, 13 aa, BK virus
EYNIMPSTHVSTN

SEQ ID NO: 25711 - protein, 13 aa, BK virus
YNIMPSTHVSTNK

SEQ ID NO: 25712 - protein, 13 aa, BK virus
NIMPSTHVSTNKS

SEQ ID NO: 25713 - protein, 13 aa, BK virus
IMPSTHVSTNKSY

SEQ ID NO: 25714 - protein, 13 aa, BK virus
MPSTHVSTNKSYR

SEQ ID NO: 25715 - protein, 13 aa, BK virus
PSTHVSTNKSYRI

SEQ ID NO: 25716 - protein, 13 aa, BK virus
STHVSTNKSYRIF

SEQ ID NO: 25717 - protein, 13 aa, BK virus
THVSTNKSYRIFF

SEQ ID NO: 25718 - protein, 13 aa, BK virus
HVSTNKSYRIFFH

SEQ ID NO: 25719 - protein, 13 aa, BK virus
VSTNKSYRIFFHK

SEQ ID NO: 25720 - protein, 13 aa, BK virus
STNKSYRIFFHKF

SEQ ID NO: 25721 - protein, 13 aa, BK virus
TNKSYRIFFHKFF

SEQ ID NO: 25722 - protein, 13 aa, BK virus
NKSYRIFFHKFFI

SEQ ID NO: 25723 - protein, 13 aa, BK virus
KSYRIFFHKFFIQ

SEQ ID NO: 25724 - protein, 13 aa, BK virus
SYRIFFHKFFIQN

SEQ ID NO: 25725 - protein, 13 aa, BK virus
YRIFFHKFFIQNL

SEQ ID NO: 25726 - protein, 13 aa, BK virus
RIFFHKFFIQNLS

SEQ ID NO: 25727 - protein, 13 aa, BK virus
IFFHKFFIQNLSF

SEQ ID NO: 25728 - protein, 13 aa, BK virus
FFHKFFIQNLSFF

SEQ ID NO: 25729 - protein, 13 aa, BK virus
FHKFFIQNLSFFF

SEQ ID NO: 25730 - protein, 13 aa, BK virus
HKFFIQNLSFFFS

SEQ ID NO: 25731 - protein, 13 aa, BK virus
KFFIQNLSFFFSS

SEQ ID NO: 25732 - protein, 13 aa, BK virus
FFIQNLSFFFSSI

SEQ ID NO: 25733 - protein, 13 aa, BK virus
FIQNLSFFFSSIH

SEQ ID NO: 25734 - protein, 13 aa, BK virus
IQNLSFFFSSIHS

SEQ ID NO: 25735 - protein, 13 aa, BK virus
QNLSFFFSSIHSK

SEQ ID NO: 25736 - protein, 13 aa, BK virus
NLSFFFSSIHSKA

SEQ ID NO: 25737 - protein, 13 aa, BK virus
LSFFFSSIHSKAG

SEQ ID NO: 25738 - protein, 13 aa, BK virus
SFFFSSIHSKAGK

SEQ ID NO: 25739 - protein, 13 aa, BK virus
FFFSSIHSKAGKG

SEQ ID NO: 25740 - protein, 13 aa, BK virus
FFSSIHSKAGKGS

SEQ ID NO: 25741 - protein, 13 aa, BK virus
FSSIHSKAGKGSI

SEQ ID NO: 25742 - protein, 13 aa, BK virus
SSIHSKAGKGSIT

SEQ ID NO: 25743 - protein, 13 aa, BK virus
SIHSKAGKGSITK

SEQ ID NO: 25744 - protein, 13 aa, BK virus
IHSKAGKGSITKY

SEQ ID NO: 25745 - protein, 13 aa, BK virus
HSKAGKGSITKYS

SEQ ID NO: 25746 - protein, 13 aa, BK virus
SKAGKGSITKYSL

SEQ ID NO: 25747 - protein, 13 aa, BK virus
KAGKGSITKYSLT

SEQ ID NO: 25748 - protein, 13 aa, BK virus
AGKGSITKYSLTK

SEQ ID NO: 25749 - protein, 13 aa, BK virus
GKGSITKYSLTKK

SEQ ID NO: 25750 - protein, 13 aa, BK virus
KGSITKYSLTKKL

SEQ ID NO: 25751 - protein, 13 aa, BK virus
GSITKYSLTKKLV

SEQ ID NO: 25752 - protein, 13 aa, BK virus
IRGKVFRVFYLSF

SEQ ID NO: 25753 - protein, 13 aa, BK virus
RGKVFRVFYLSFF

SEQ ID NO: 25754 - protein, 13 aa, BK virus
GKVFRVFYLSFFF

SEQ ID NO: 25755 - protein, 13 aa, BK virus
KVFRVFYLSFFFG

SEQ ID NO: 25756 - protein, 13 aa, BK virus
VFRVFYLSFFFGW

SEQ ID NO: 25757 - protein, 13 aa, BK virus
FRVFYLSFFFGWC

SEQ ID NO: 25758 - protein, 13 aa, BK virus
VLRICCCFFITGK

SEQ ID NO: 25759 - protein, 13 aa, BK virus
LRICCCFFITGKH

SEQ ID NO: 25760 - protein, 13 aa, BK virus
RICCCFFITGKHI

SEQ ID NO: 25761 - protein, 13 aa, BK virus
ICCCFFITGKHIF

SEQ ID NO: 25762 - protein, 13 aa, BK virus
CCCFFITGKHIFM

SEQ ID NO: 25763 - protein, 13 aa, BK virus
CCFFITGKHIFMA

SEQ ID NO: 25764 - protein, 13 aa, BK virus
CFFITGKHIFMAK

SEQ ID NO: 25765 - protein, 13 aa, BK virus
IFIPFFIKGTPPG

SEQ ID NO: 25766 - protein, 13 aa, BK virus
FIPFFIKGTPPGL

SEQ ID NO: 25767 - protein, 13 aa, BK virus
IPFFIKGTPPGLP

SEQ ID NO: 25768 - protein, 13 aa, BK virus
PFFIKGTPPGLPL

SEQ ID NO: 25769 - protein, 13 aa, BK virus
FFIKGTPPGLPLF

SEQ ID NO: 25770 - protein, 13 aa, BK virus
FIKGTPPGLPLFC

SEQ ID NO: 25771 - protein, 13 aa, BK virus
IKGTPPGLPLFCS

SEQ ID NO: 25772 - protein, 13 aa, BK virus
KGTPPGLPLFCSI

SEQ ID NO: 25773 - protein, 13 aa, BK virus
GTPPGLPLFCSIG

SEQ ID NO: 25774 - protein, 13 aa, BK virus
TPPGLPLFCSIGW

SEQ ID NO: 25775 - protein, 13 aa, BK virus
PPGLPLFCSIGWH

SEQ ID NO: 25776 - protein, 13 aa, BK virus
PGLPLFCSIGWHL

SEQ ID NO: 25777 - protein, 13 aa, BK virus
SFRSLKGVSPIIW

SEQ ID NO: 25778 - protein, 13 aa, BK virus
FRSLKGVSPIIWT

SEQ ID NO: 25779 - protein, 13 aa, BK virus
RSLKGVSPIIWTH

SEQ ID NO: 25780 - protein, 13 aa, BK virus
SLKGVSPIIWTHH

SEQ ID NO: 25781 - protein, 13 aa, BK virus
LKGVSPIIWTHHC

SEQ ID NO: 25782 - protein, 13 aa, BK virus
KGVSPIIWTHHCR

SEQ ID NO: 25783 - protein, 13 aa, BK virus
GVSPIIWTHHCRV

SEQ ID NO: 25784 - protein, 13 aa, BK virus
VSPIIWTHHCRVS

SEQ ID NO: 25785 - protein, 13 aa, BK virus
SPIIWTHHCRVSS

SEQ ID NO: 25786 - protein, 13 aa, BK virus
PIIWTHHCRVSSV

SEQ ID NO: 25787 - protein, 13 aa, BK virus
IIWTHHCRVSSVR

SEQ ID NO: 25788 - protein, 13 aa, BK virus
IWTHHCRVSSVRS

SEQ ID NO: 25789 - protein, 13 aa, BK virus
WTHHCRVSSVRSK

SEQ ID NO: 25790 - protein, 13 aa, BK virus
THHCRVSSVRSKP

SEQ ID NO: 25791 - protein, 13 aa, BK virus
HHCRVSSVRSKPN

SEQ ID NO: 25792 - protein, 13 aa, BK virus
HCRVSSVRSKPNH

SEQ ID NO: 25793 - protein, 13 aa, BK virus
CRVSSVRSKPNHC

SEQ ID NO: 25794 - protein, 13 aa, BK virus
RVSSVRSKPNHCV

SEQ ID NO: 25795 - protein, 13 aa, BK virus
VSSVRSKPNHCVK

SEQ ID NO: 25796 - protein, 13 aa, BK virus
SSVRSKPNHCVKQ

SEQ ID NO: 25797 - protein, 13 aa, BK virus
SVRSKPNHCVKQS

SEQ ID NO: 25798 - protein, 13 aa, BK virus
VRSKPNHCVKQSM

SEQ ID NO: 25799 - protein, 13 aa, BK virus
RSKPNHCVKQSMQ

SEQ ID NO: 25800 - protein, 13 aa, BK virus
QSIQTKGSFLKNF

SEQ ID NO: 25801 - protein, 13 aa, BK virus
SIQTKGSFLKNFL

SEQ ID NO: 25802 - protein, 13 aa, BK virus
IQTKGSFLKNFLF

SEQ ID NO: 25803 - protein, 13 aa, BK virus
QTKGSFLKNFLFK

SEQ ID NO: 25804 - protein, 13 aa, BK virus
TKGSFLKNFLFKC

SEQ ID NO: 25805 - protein, 13 aa, BK virus
KGSFLKNFLFKCL

SEQ ID NO: 25806 - protein, 13 aa, BK virus
GSFLKNFLFKCLN

SEQ ID NO: 25807 - protein, 13 aa, BK virus
SFLKNFLFKCLNL

SEQ ID NO: 25808 - protein, 13 aa, BK virus
FLKNFLFKCLNLS

SEQ ID NO: 25809 - protein, 13 aa, BK virus
HSMQGQCTEGFLE

SEQ ID NO: 25810 - protein, 13 aa, BK virus
SMQGQCTEGFLEQ

SEQ ID NO: 25811 - protein, 13 aa, BK virus
MQGQCTEGFLEQI

SEQ ID NO: 25812 - protein, 13 aa, BK virus
QGQCTEGFLEQIG

SEQ ID NO: 25813 - protein, 13 aa, BK virus
GQCTEGFLEQIGH

SEQ ID NO: 25814 - protein, 13 aa, BK virus
QCTEGFLEQIGHS

SEQ ID NO: 25815 - protein, 13 aa, BK virus
CTEGFLEQIGHSL

SEQ ID NO: 25816 - protein, 13 aa, BK virus
TEGFLEQIGHSLQ

SEQ ID NO: 25817 - protein, 13 aa, BK virus
EGFLEQIGHSLQY

SEQ ID NO: 25818 - protein, 13 aa, BK virus
GFLEQIGHSLQYR

SEQ ID NO: 25819 - protein, 13 aa, BK virus
FLEQIGHSLQYRV

SEQ ID NO: 25820 - protein, 13 aa, BK virus
LEQIGHSLQYRVS

SEQ ID NO: 25821 - protein, 13 aa, BK virus
EQIGHSLQYRVSG

SEQ ID NO: 25822 - protein, 13 aa, BK virus
QIGHSLQYRVSGQ

SEQ ID NO: 25823 - protein, 13 aa, BK virus
IGHSLQYRVSGQR

SEQ ID NO: 25824 - protein, 13 aa, BK virus
GHSLQYRVSGQRG

SEQ ID NO: 25825 - protein, 13 aa, BK virus
HSLQYRVSGQRGK

SEQ ID NO: 25826 - protein, 13 aa, BK virus
SLQYRVSGQRGKS

SEQ ID NO: 25827 - protein, 13 aa, BK virus
LQYRVSGQRGKSA

SEQ ID NO: 25828 - protein, 13 aa, BK virus
QYRVSGQRGKSAQ

SEQ ID NO: 25829 - protein, 13 aa, BK virus
YRVSGQRGKSAQT

SEQ ID NO: 25830 - protein, 13 aa, BK virus
RVSGQRGKSAQTS

SEQ ID NO: 25831 - protein, 13 aa, BK virus
VSGQRGKSAQTSE

SEQ ID NO: 25832 - protein, 13 aa, BK virus
SGQRGKSAQTSEL

SEQ ID NO: 25833 - protein, 13 aa, BK virus
GQRGKSAQTSELL

SEQ ID NO: 25834 - protein, 13 aa, BK virus
QRGKSAQTSELLQ

SEQ ID NO: 25835 - protein, 13 aa, BK virus
RGKSAQTSELLQV

SEQ ID NO: 25836 - protein, 13 aa, BK virus
GKSAQTSELLQVP

SEQ ID NO: 25837 - protein, 13 aa, BK virus
KSAQTSELLQVPK

SEQ ID NO: 25838 - protein, 13 aa, BK virus
SAQTSELLQVPKS

SEQ ID NO: 25839 - protein, 13 aa, BK virus
AQTSELLQVPKSG

SEQ ID NO: 25840 - protein, 13 aa, BK virus
ATFTSCSIFLYKV

SEQ ID NO: 25841 - protein, 13 aa, BK virus
TFTSCSIFLYKVF

SEQ ID NO: 25842 - protein, 13 aa, BK virus
FTSCSIFLYKVFI

SEQ ID NO: 25843 - protein, 13 aa, BK virus
TSCSIFLYKVFIL

SEQ ID NO: 25844 - protein, 13 aa, BK virus
SCSIFLYKVFILF

SEQ ID NO: 25845 - protein, 13 aa, BK virus
CSIFLYKVFILFI

SEQ ID NO: 25846 - protein, 13 aa, BK virus
SIFLYKVFILFIL

SEQ ID NO: 25847 - protein, 13 aa, BK virus
IFLYKVFILFILS

SEQ ID NO: 25848 - protein, 13 aa, BK virus
FLYKVFILFILSS

SEQ ID NO: 25849 - protein, 13 aa, BK virus
LYKVFILFILSSS

SEQ ID NO: 25850 - protein, 13 aa, BK virus
YKVFILFILSSSP

SEQ ID NO: 25851 - protein, 13 aa, BK virus
KVFILFILSSSPP

SEQ ID NO: 25852 - protein, 13 aa, BK virus
VFILFILSSSPPL

SEQ ID NO: 25853 - protein, 13 aa, BK virus
FILFILSSSPPLS

SEQ ID NO: 25854 - protein, 13 aa, BK virus
ILFILSSSPPLSG

SEQ ID NO: 25855 - protein, 13 aa, BK virus
AFLIKGRFPQAAL

SEQ ID NO: 25856 - protein, 13 aa, BK virus
FLIKGRFPQAALS

SEQ ID NO: 25857 - protein, 13 aa, BK virus
LIKGRFPQAALSR

SEQ ID NO: 25858 - protein, 13 aa, BK virus
IKGRFPQAALSRP

SEQ ID NO: 25859 - protein, 13 aa, BK virus
KGRFPQAALSRPK

SEQ ID NO: 25860 - protein, 13 aa, BK virus
GRFPQAALSRPKR

SEQ ID NO: 25861 - protein, 13 aa, BK virus
RFPQAALSRPKRS

SEQ ID NO: 25862 - protein, 13 aa, BK virus
FPQAALSRPKRSM

SEQ ID NO: 25863 - protein, 13 aa, BK virus
PQAALSRPKRSMS

SEQ ID NO: 25864 - protein, 13 aa, BK virus
QAALSRPKRSMSS

SEQ ID NO: 25865 - protein, 13 aa, BK virus
AALSRPKRSMSSM

SEQ ID NO: 25866 - protein, 13 aa, BK virus
ALSRPKRSMSSMD

SEQ ID NO: 25867 - protein, 13 aa, BK virus
LSRPKRSMSSMDS

SEQ ID NO: 25868 - protein, 13 aa, BK virus
SRPKRSMSSMDSS

SEQ ID NO: 25869 - protein, 13 aa, BK virus
RPKRSMSSMDSSL

SEQ ID NO: 25870 - protein, 13 aa, BK virus
PKRSMSSMDSSLL

SEQ ID NO: 25871 - protein, 13 aa, BK virus
KRSMSSMDSSLLR

SEQ ID NO: 25872 - protein, 13 aa, BK virus
RSMSSMDSSLLRT

SEQ ID NO: 25873 - protein, 13 aa, BK virus
SMSSMDSSLLRTL

SEQ ID NO: 25874 - protein, 13 aa, BK virus
MSSMDSSLLRTLS

SEQ ID NO: 25875 - protein, 14 aa, BK virus
FCKNCKRIGISPNS

SEQ ID NO: 25876 - protein, 14 aa, BK virus
CKNCKRIGISPNSF

SEQ ID NO: 25877 - protein, 14 aa, BK virus
KNCKRIGISPNSFA

SEQ ID NO: 25878 - protein, 14 aa, BK virus
NCKRIGISPNSFAR

SEQ ID NO: 25879 - protein, 14 aa, BK virus
CKRIGISPNSFARP

SEQ ID NO: 25880 - protein, 14 aa, BK virus
KRIGISPNSFARPQ

SEQ ID NO: 25881 - protein, 14 aa, BK virus
RIGISPNSFARPQK

SEQ ID NO: 25882 - protein, 14 aa, BK virus
IGISPNSFARPQKK

SEQ ID NO: 25883 - protein, 14 aa, BK virus
GISPNSFARPQKKP

SEQ ID NO: 25884 - protein, 14 aa, BK virus
ISPNSFARPQKKPP

SEQ ID NO: 25885 - protein, 14 aa, BK virus
SPNSFARPQKKPPH

SEQ ID NO: 25886 - protein, 14 aa, BK virus
PNSFARPQKKPPHP

SEQ ID NO: 25887 - protein, 14 aa, BK virus
NSFARPQKKPPHPY

SEQ ID NO: 25888 - protein, 14 aa, BK virus
SFARPQKKPPHPYY

SEQ ID NO: 25889 - protein, 14 aa, BK virus
FARPQKKPPHPYYL

SEQ ID NO: 25890 - protein, 14 aa, BK virus
ARPQKKPPHPYYLR

SEQ ID NO: 25891 - protein, 14 aa, BK virus
RPQKKPPHPYYLRE

SEQ ID NO: 25892 - protein, 14 aa, BK virus
PQKKPPHPYYLRER

SEQ ID NO: 25893 - protein, 14 aa, BK virus
QKKPPHPYYLRERV

SEQ ID NO: 25894 - protein, 14 aa, BK virus
KKPPHPYYLRERVE

SEQ ID NO: 25895 - protein, 14 aa, BK virus
KPPHPYYLRERVEA

SEQ ID NO: 25896 - protein, 14 aa, BK virus
PPHPYYLRERVEAE

SEQ ID NO: 25897 - protein, 14 aa, BK virus
PHPYYLRERVEAEA

SEQ ID NO: 25898 - protein, 14 aa, BK virus
HPYYLRERVEAEAA

SEQ ID NO: 25899 - protein, 14 aa, BK virus
PYYLRERVEAEAAS

SEQ ID NO: 25900 - protein, 14 aa, BK virus
YYLRERVEAEAASA

SEQ ID NO: 25901 - protein, 14 aa, BK virus
YLRERVEAEAASAS

SEQ ID NO: 25902 - protein, 14 aa, BK virus
LRERVEAEAASASY

SEQ ID NO: 25903 - protein, 14 aa, BK virus
RERVEAEAASASYI

SEQ ID NO: 25904 - protein, 14 aa, BK virus
ERVEAEAASASYIL

SEQ ID NO: 25905 - protein, 14 aa, BK virus
KKRPQGGAAYPWNA

SEQ ID NO: 25906 - protein, 14 aa, BK virus
KRPQGGAAYPWNAA

SEQ ID NO: 25907 - protein, 14 aa, BK virus
RPQGGAAYPWNAAK

SEQ ID NO: 25908 - protein, 14 aa, BK virus
PQGGAAYPWNAAKP

SEQ ID NO: 25909 - protein, 14 aa, BK virus
PQEGKCMTHRGMQP

SEQ ID NO: 25910 - protein, 14 aa, BK virus
QEGKCMTHRGMQPN

SEQ ID NO: 25911 - protein, 14 aa, BK virus
EGKCMTHRGMQPNH

SEQ ID NO: 25912 - protein, 14 aa, BK virus
GKCMTHRGMQPNHD

SEQ ID NO: 25913 - protein, 14 aa, BK virus
KCMTHRGMQPNHDL

SEQ ID NO: 25914 - protein, 14 aa, BK virus
CMTHRGMQPNHDLR

SEQ ID NO: 25915 - protein, 14 aa, BK virus
MTHRGMQPNHDLRK

SEQ ID NO: 25916 - protein, 14 aa, BK virus
THRGMQPNHDLRKE

SEQ ID NO: 25917 - protein, 14 aa, BK virus
HRGMQPNHDLRKES

SEQ ID NO: 25918 - protein, 14 aa, BK virus
RGMQPNHDLRKESA

SEQ ID NO: 25919 - protein, 14 aa, BK virus
LTGRSCLPMECSQT

SEQ ID NO: 25920 - protein, 14 aa, BK virus
TGRSCLPMECSQTM

SEQ ID NO: 25921 - protein, 14 aa, BK virus
GRSCLPMECSQTMT

SEQ ID NO: 25922 - protein, 14 aa, BK virus
RSCLPMECSQTMTS

SEQ ID NO: 25923 - protein, 14 aa, BK virus
SCLPMECSQTMTSG

SEQ ID NO: 25924 - protein, 14 aa, BK virus
CLPMECSQTMTSGR

SEQ ID NO: 25925 - protein, 14 aa, BK virus
LPMECSQTMTSGRK

SEQ ID NO: 25926 - protein, 14 aa, BK virus
PMECSQTMTSGRKV

SEQ ID NO: 25927 - protein, 14 aa, BK virus
MECSQTMTSGRKVH

SEQ ID NO: 25928 - protein, 14 aa, BK virus
ECSQTMTSGRKVHD

SEQ ID NO: 25929 - protein, 14 aa, BK virus
CSQTMTSGRKVHDR

SEQ ID NO: 25930 - protein, 14 aa, BK virus
SQTMTSGRKVHDRH

SEQ ID NO: 25931 - protein, 14 aa, BK virus
QTMTSGRKVHDRHV

SEQ ID NO: 25932 - protein, 14 aa, BK virus
TMTSGRKVHDRHVL

SEQ ID NO: 25933 - protein, 14 aa, BK virus
MTSGRKVHDRHVLR

SEQ ID NO: 25934 - protein, 14 aa, BK virus
TSGRKVHDRHVLRA

SEQ ID NO: 25935 - protein, 14 aa, BK virus
ESWPCPQLNWTKAM

SEQ ID NO: 25936 - protein, 14 aa, BK virus
SWPCPQLNWTKAMV

SEQ ID NO: 25937 - protein, 14 aa, BK virus
WPCPQLNWTKAMVL

SEQ ID NO: 25938 - protein, 14 aa, BK virus
PCPQLNWTKAMVLR

SEQ ID NO: 25939 - protein, 14 aa, BK virus
CPQLNWTKAMVLRQ

SEQ ID NO: 25940 - protein, 14 aa, BK virus
PQLNWTKAMVLRQL

SEQ ID NO: 25941 - protein, 14 aa, BK virus
QLNWTKAMVLRQLS

SEQ ID NO: 25942 - protein, 14 aa, BK virus
LNWTKAMVLRQLSR

SEQ ID NO: 25943 - protein, 14 aa, BK virus
NWTKAMVLRQLSRQ

SEQ ID NO: 25944 - protein, 14 aa, BK virus
WTKAMVLRQLSRQA

SEQ ID NO: 25945 - protein, 14 aa, BK virus
TKAMVLRQLSRQAS

SEQ ID NO: 25946 - protein, 14 aa, BK virus
KAMVLRQLSRQASV

SEQ ID NO: 25947 - protein, 14 aa, BK virus
AMVLRQLSRQASVK

SEQ ID NO: 25948 - protein, 14 aa, BK virus
MVLRQLSRQASVKV

SEQ ID NO: 25949 - protein, 14 aa, BK virus
VLRQLSRQASVKVG

SEQ ID NO: 25950 - protein, 14 aa, BK virus
LRQLSRQASVKVGK

SEQ ID NO: 25951 - protein, 14 aa, BK virus
RQLSRQASVKVGKT

SEQ ID NO: 25952 - protein, 14 aa, BK virus
QLSRQASVKVGKTW

SEQ ID NO: 25953 - protein, 14 aa, BK virus
LSRQASVKVGKTWT

SEQ ID NO: 25954 - protein, 14 aa, BK virus
SRQASVKVGKTWTG

SEQ ID NO: 25955 - protein, 14 aa, BK virus
RQASVKVGKTWTGT

SEQ ID NO: 25956 - protein, 14 aa, BK virus
QASVKVGKTWTGTK

SEQ ID NO: 25957 - protein, 14 aa, BK virus
ASVKVGKTWTGTKK

SEQ ID NO: 25958 - protein, 14 aa, BK virus
SVKVGKTWTGTKKR

SEQ ID NO: 25959 - protein, 14 aa, BK virus
VKVGKTWTGTKKRA

SEQ ID NO: 25960 - protein, 14 aa, BK virus
KVGKTWTGTKKRAQ

SEQ ID NO: 25961 - protein, 14 aa, BK virus
VGKTWTGTKKRAQR

SEQ ID NO: 25962 - protein, 14 aa, BK virus
GKTWTGTKKRAQRI

SEQ ID NO: 25963 - protein, 14 aa, BK virus
KTWTGTKKRAQRIF

SEQ ID NO: 25964 - protein, 14 aa, BK virus
TWTGTKKRAQRIFI

SEQ ID NO: 25965 - protein, 14 aa, BK virus
WTGTKKRAQRIFIF

SEQ ID NO: 25966 - protein, 14 aa, BK virus
TGTKKRAQRIFIFI

SEQ ID NO: 25967 - protein, 14 aa, BK virus
GTKKRAQRIFIFIL

SEQ ID NO: 25968 - protein, 14 aa, BK virus
TKKRAQRIFIFILE

SEQ ID NO: 25969 - protein, 14 aa, BK virus
KKRAQRIFIFILEL

SEQ ID NO: 25970 - protein, 14 aa, BK virus
KRAQRIFIFILELL

SEQ ID NO: 25971 - protein, 14 aa, BK virus
RAQRIFIFILELLL

SEQ ID NO: 25972 - protein, 14 aa, BK virus
AQRIFIFILELLLE

SEQ ID NO: 25973 - protein, 14 aa, BK virus
QRIFIFILELLLEF

SEQ ID NO: 25974 - protein, 14 aa, BK virus
RIFIFILELLLEFC

SEQ ID NO: 25975 - protein, 14 aa, BK virus
IFIFILELLLEFCR

SEQ ID NO: 25976 - protein, 14 aa, BK virus
FIFILELLLEFCRG

SEQ ID NO: 25977 - protein, 14 aa, BK virus
IFILELLLEFCRGE

SEQ ID NO: 25978 - protein, 14 aa, BK virus
FILELLLEFCRGED

SEQ ID NO: 25979 - protein, 14 aa, BK virus
ILELLLEFCRGEDS

SEQ ID NO: 25980 - protein, 14 aa, BK virus
LELLLEFCRGEDSV

SEQ ID NO: 25981 - protein, 14 aa, BK virus
ELLLEFCRGEDSVD

SEQ ID NO: 25982 - protein, 14 aa, BK virus
LLLEFCRGEDSVDG

SEQ ID NO: 25983 - protein, 14 aa, BK virus
LLEFCRGEDSVDGK

SEQ ID NO: 25984 - protein, 14 aa, BK virus
LEFCRGEDSVDGKN

SEQ ID NO: 25985 - protein, 14 aa, BK virus
EFCRGEDSVDGKNK

SEQ ID NO: 25986 - protein, 14 aa, BK virus
FCRGEDSVDGKNKS

SEQ ID NO: 25987 - protein, 14 aa, BK virus
CRGEDSVDGKNKST

SEQ ID NO: 25988 - protein, 14 aa, BK virus
RGEDSVDGKNKSTT

SEQ ID NO: 25989 - protein, 14 aa, BK virus
GEDSVDGKNKSTTA

SEQ ID NO: 25990 - protein, 14 aa, BK virus
EDSVDGKNKSTTAL

SEQ ID NO: 25991 - protein, 14 aa, BK virus
DSVDGKNKSTTALP

SEQ ID NO: 25992 - protein, 14 aa, BK virus
SVDGKNKSTTALPA

SEQ ID NO: 25993 - protein, 14 aa, BK virus
VDGKNKSTTALPAV

SEQ ID NO: 25994 - protein, 14 aa, BK virus
DGKNKSTTALPAVK

SEQ ID NO: 25995 - protein, 14 aa, BK virus
GKNKSTTALPAVKD

SEQ ID NO: 25996 - protein, 14 aa, BK virus
KNKSTTALPAVKDS

SEQ ID NO: 25997 - protein, 14 aa, BK virus
NKSTTALPAVKDSV

SEQ ID NO: 25998 - protein, 14 aa, BK virus
KSTTALPAVKDSVK

SEQ ID NO: 25999 - protein, 14 aa, BK virus
STTALPAVKDSVKD

SEQ ID NO: 26000 - protein, 14 aa, BK virus
TTALPAVKDSVKDS

SEQ ID NO: 26001 - protein, 14 aa, BK virus
VSNPFFFVFPGSWV

SEQ ID NO: 26002 - protein, 14 aa, BK virus
SNPFFFVFPGSWVL

SEQ ID NO: 26003 - protein, 14 aa, BK virus
NPFFFVFPGSWVLL

SEQ ID NO: 26004 - protein, 14 aa, BK virus
LPVYLRLLLPQDFQ

SEQ ID NO: 26005 - protein, 14 aa, BK virus
PVYLRLLLPQDFQW

SEQ ID NO: 26006 - protein, 14 aa, BK virus
VYLRLLLPQDFQWL

SEQ ID NO: 26007 - protein, 14 aa, BK virus
YLRLLLPQDFQWLK

SEQ ID NO: 26008 - protein, 14 aa, BK virus
LRLLLPQDFQWLKL

SEQ ID NO: 26009 - protein, 14 aa, BK virus
RLLLPQDFQWLKLL

SEQ ID NO: 26010 - protein, 14 aa, BK virus
LLLPQDFQWLKLLL

SEQ ID NO: 26011 - protein, 14 aa, BK virus
LLPQDFQWLKLLLG

SEQ ID NO: 26012 - protein, 14 aa, BK virus
LPQDFQWLKLLLGR

SEQ ID NO: 26013 - protein, 14 aa, BK virus
PQDFQWLKLLLGRL

SEQ ID NO: 26014 - protein, 14 aa, BK virus
QDFQWLKLLLGRLL

SEQ ID NO: 26015 - protein, 14 aa, BK virus
DFQWLKLLLGRLLL

SEQ ID NO: 26016 - protein, 14 aa, BK virus
FQWLKLLLGRLLLL

SEQ ID NO: 26017 - protein, 14 aa, BK virus
GISSLMIGITKFPL

SEQ ID NO: 26018 - protein, 14 aa, BK virus
ASISNQAWLWNCLT

SEQ ID NO: 26019 - protein, 14 aa, BK virus
SISNQAWLWNCLTQ

SEQ ID NO: 26020 - protein, 14 aa, BK virus
ISNQAWLWNCLTQM

SEQ ID NO: 26021 - protein, 14 aa, BK virus
SNQAWLWNCLTQMS

SEQ ID NO: 26022 - protein, 14 aa, BK virus
NQAWLWNCLTQMST

SEQ ID NO: 26023 - protein, 14 aa, BK virus
QAWLWNCLTQMSTM

SEQ ID NO: 26024 - protein, 14 aa, BK virus
AWLWNCLTQMSTMI

SEQ ID NO: 26025 - protein, 14 aa, BK virus
WLWNCLTQMSTMIF

SEQ ID NO: 26026 - protein, 14 aa, BK virus
LWNCLTQMSTMIFC

SEQ ID NO: 26027 - protein, 14 aa, BK virus
WNCLTQMSTMIFCF

SEQ ID NO: 26028 - protein, 14 aa, BK virus
NCLTQMSTMIFCFL

SEQ ID NO: 26029 - protein, 14 aa, BK virus
CLTQMSTMIFCFLV

SEQ ID NO: 26030 - protein, 14 aa, BK virus
ILLLIIFNTLILGI

SEQ ID NO: 26031 - protein, 14 aa, BK virus
LLLIIFNTLILGIG

SEQ ID NO: 26032 - protein, 14 aa, BK virus
LLIIFNTLILGIGV

SEQ ID NO: 26033 - protein, 14 aa, BK virus
LIIFNTLILGIGVL

SEQ ID NO: 26034 - protein, 14 aa, BK virus
IIFNTLILGIGVLL

SEQ ID NO: 26035 - protein, 14 aa, BK virus
IFNTLILGIGVLLC

SEQ ID NO: 26036 - protein, 14 aa, BK virus
FNTLILGIGVLLCL

SEQ ID NO: 26037 - protein, 14 aa, BK virus
NTLILGIGVLLCLL

SEQ ID NO: 26038 - protein, 14 aa, BK virus
TLILGIGVLLCLLL

SEQ ID NO: 26039 - protein, 14 aa, BK virus
LILGIGVLLCLLLF

SEQ ID NO: 26040 - protein, 14 aa, BK virus
ILGIGVLLCLLLFP

SEQ ID NO: 26041 - protein, 14 aa, BK virus
LGIGVLLCLLLFPR

SEQ ID NO: 26042 - protein, 14 aa, BK virus
GIGVLLCLLLFPRL

SEQ ID NO: 26043 - protein, 14 aa, BK virus
IGVLLCLLLFPRLC

SEQ ID NO: 26044 - protein, 14 aa, BK virus
GVLLCLLLFPRLCG

SEQ ID NO: 26045 - protein, 14 aa, BK virus
VLLCLLLFPRLCGM

SEQ ID NO: 26046 - protein, 14 aa, BK virus
LLCLLLFPRLCGML

SEQ ID NO: 26047 - protein, 14 aa, BK virus
LCLLLFPRLCGMLL

SEQ ID NO: 26048 - protein, 14 aa, BK virus
CLLLFPRLCGMLLG

SEQ ID NO: 26049 - protein, 14 aa, BK virus
LLLFPRLCGMLLGM

SEQ ID NO: 26050 - protein, 14 aa, BK virus
LLFPRLCGMLLGMI

SEQ ID NO: 26051 - protein, 14 aa, BK virus
LFPRLCGMLLGMIY

SEQ ID NO: 26052 - protein, 14 aa, BK virus
FPRLCGMLLGMIYL

SEQ ID NO: 26053 - protein, 14 aa, BK virus
PRLCGMLLGMIYLL

SEQ ID NO: 26054 - protein, 14 aa, BK virus
PHRNCREEQKDFLE

SEQ ID NO: 26055 - protein, 14 aa, BK virus
HRNCREEQKDFLET

SEQ ID NO: 26056 - protein, 14 aa, BK virus
RNCREEQKDFLETP

SEQ ID NO: 26057 - protein, 14 aa, BK virus
NCREEQKDFLETPW

SEQ ID NO: 26058 - protein, 14 aa, BK virus
CREEQKDFLETPWL

SEQ ID NO: 26059 - protein, 14 aa, BK virus
REEQKDFLETPWLD

SEQ ID NO: 26060 - protein, 14 aa, BK virus
EEQKDFLETPWLDF

SEQ ID NO: 26061 - protein, 14 aa, BK virus
EQKDFLETPWLDFW

SEQ ID NO: 26062 - protein, 14 aa, BK virus
QKDFLETPWLDFWR

SEQ ID NO: 26063 - protein, 14 aa, BK virus
KDFLETPWLDFWRK

SEQ ID NO: 26064 - protein, 14 aa, BK virus
DFLETPWLDFWRKL

SEQ ID NO: 26065 - protein, 14 aa, BK virus
FLETPWLDFWRKLP

SEQ ID NO: 26066 - protein, 14 aa, BK virus
LETPWLDFWRKLPG

SEQ ID NO: 26067 - protein, 14 aa, BK virus
ETPWLDFWRKLPGQ

SEQ ID NO: 26068 - protein, 14 aa, BK virus
TPWLDFWRKLPGQL

SEQ ID NO: 26069 - protein, 14 aa, BK virus
TFIIIFNNIILIFP

SEQ ID NO: 26070 - protein, 14 aa, BK virus
FIIIFNNIILIFPL

SEQ ID NO: 26071 - protein, 14 aa, BK virus
IIIFNNIILIFPLL

SEQ ID NO: 26072 - protein, 14 aa, BK virus
IIFNNIILIFPLLG

SEQ ID NO: 26073 - protein, 14 aa, BK virus
IFNNIILIFPLLGP

SEQ ID NO: 26074 - protein, 14 aa, BK virus
FNNIILIFPLLGPQ

SEQ ID NO: 26075 - protein, 14 aa, BK virus
NNIILIFPLLGPQW

SEQ ID NO: 26076 - protein, 14 aa, BK virus
NIILIFPLLGPQWL

SEQ ID NO: 26077 - protein, 14 aa, BK virus
IILIFPLLGPQWLD

SEQ ID NO: 26078 - protein, 14 aa, BK virus
ILIFPLLGPQWLDK

SEQ ID NO: 26079 - protein, 14 aa, BK virus
LKGKVPVYILAILI

SEQ ID NO: 26080 - protein, 14 aa, BK virus
KGKVPVYILAILIV

SEQ ID NO: 26081 - protein, 14 aa, BK virus
KKLLPQEVLIKELL

SEQ ID NO: 26082 - protein, 14 aa, BK virus
KLLPQEVLIKELLL

SEQ ID NO: 26083 - protein, 14 aa, BK virus
LLPQEVLIKELLLN

SEQ ID NO: 26084 - protein, 14 aa, BK virus
LPQEVLIKELLLNG

SEQ ID NO: 26085 - protein, 14 aa, BK virus
PQEVLIKELLLNGC

SEQ ID NO: 26086 - protein, 14 aa, BK virus
QEVLIKELLLNGCC

SEQ ID NO: 26087 - protein, 14 aa, BK virus
EVLIKELLLNGCCL

SEQ ID NO: 26088 - protein, 14 aa, BK virus
VLIKELLLNGCCLY

SEQ ID NO: 26089 - protein, 14 aa, BK virus
LIKELLLNGCCLYF

SEQ ID NO: 26090 - protein, 14 aa, BK virus
HLLLKHMKMAPTKR

SEQ ID NO: 26091 - protein, 14 aa, BK virus
LLLKHMKMAPTKRK

SEQ ID NO: 26092 - protein, 14 aa, BK virus
LLKHMKMAPTKRKG

SEQ ID NO: 26093 - protein, 14 aa, BK virus
LKHMKMAPTKRKGE

SEQ ID NO: 26094 - protein, 14 aa, BK virus
KHMKMAPTKRKGEC

SEQ ID NO: 26095 - protein, 14 aa, BK virus
HMKMAPTKRKGECP

SEQ ID NO: 26096 - protein, 14 aa, BK virus
MKMAPTKRKGECPG

SEQ ID NO: 26097 - protein, 14 aa, BK virus
KMAPTKRKGECPGA

SEQ ID NO: 26098 - protein, 14 aa, BK virus
MAPTKRKGECPGAA

SEQ ID NO: 26099 - protein, 14 aa, BK virus
APTKRKGECPGAAP

SEQ ID NO: 26100 - protein, 14 aa, BK virus
PTKRKGECPGAAPK

SEQ ID NO: 26101 - protein, 14 aa, BK virus
TKRKGECPGAAPKK

SEQ ID NO: 26102 - protein, 14 aa, BK virus
KRKGECPGAAPKKP

SEQ ID NO: 26103 - protein, 14 aa, BK virus
RKGECPGAAPKKPK

SEQ ID NO: 26104 - protein, 14 aa, BK virus
KGECPGAAPKKPKE

SEQ ID NO: 26105 - protein, 14 aa, BK virus
GECPGAAPKKPKEP

SEQ ID NO: 26106 - protein, 14 aa, BK virus
ECPGAAPKKPKEPV

SEQ ID NO: 26107 - protein, 14 aa, BK virus
CPGAAPKKPKEPVQ

SEQ ID NO: 26108 - protein, 14 aa, BK virus
PGAAPKKPKEPVQV

SEQ ID NO: 26109 - protein, 14 aa, BK virus
GAAPKKPKEPVQVP

SEQ ID NO: 26110 - protein, 14 aa, BK virus
AAPKKPKEPVQVPK

SEQ ID NO: 26111 - protein, 14 aa, BK virus
APKKPKEPVQVPKL

SEQ ID NO: 26112 - protein, 14 aa, BK virus
PKKPKEPVQVPKLL

SEQ ID NO: 26113 - protein, 14 aa, BK virus
KKPKEPVQVPKLLI

SEQ ID NO: 26114 - protein, 14 aa, BK virus
KPKEPVQVPKLLIK

SEQ ID NO: 26115 - protein, 14 aa, BK virus
PKEPVQVPKLLIKG

SEQ ID NO: 26116 - protein, 14 aa, BK virus
KEPVQVPKLLIKGG

SEQ ID NO: 26117 - protein, 14 aa, BK virus
EPVQVPKLLIKGGV

SEQ ID NO: 26118 - protein, 14 aa, BK virus
PVQVPKLLIKGGVE

SEQ ID NO: 26119 - protein, 14 aa, BK virus
VQVPKLLIKGGVEV

SEQ ID NO: 26120 - protein, 14 aa, BK virus
QVPKLLIKGGVEVL

SEQ ID NO: 26121 - protein, 14 aa, BK virus
VPKLLIKGGVEVLE

SEQ ID NO: 26122 - protein, 14 aa, BK virus
PKLLIKGGVEVLEV

SEQ ID NO: 26123 - protein, 14 aa, BK virus
KLLIKGGVEVLEVK

SEQ ID NO: 26124 - protein, 14 aa, BK virus
LLIKGGVEVLEVKT

SEQ ID NO: 26125 - protein, 14 aa, BK virus
LIKGGVEVLEVKTG

SEQ ID NO: 26126 - protein, 14 aa, BK virus
IKGGVEVLEVKTGV

SEQ ID NO: 26127 - protein, 14 aa, BK virus
KGGVEVLEVKTGVD

SEQ ID NO: 26128 - protein, 14 aa, BK virus
GGVEVLEVKTGVDA

SEQ ID NO: 26129 - protein, 14 aa, BK virus
GVEVLEVKTGVDAI

SEQ ID NO: 26130 - protein, 14 aa, BK virus
VEVLEVKTGVDAIT

SEQ ID NO: 26131 - protein, 14 aa, BK virus
EVLEVKTGVDAITE

SEQ ID NO: 26132 - protein, 14 aa, BK virus
VLEVKTGVDAITEV

SEQ ID NO: 26133 - protein, 14 aa, BK virus
LEVKTGVDAITEVE

SEQ ID NO: 26134 - protein, 14 aa, BK virus
EVKTGVDAITEVEC

SEQ ID NO: 26135 - protein, 14 aa, BK virus
VKTGVDAITEVECF

SEQ ID NO: 26136 - protein, 14 aa, BK virus
KTGVDAITEVECFL

SEQ ID NO: 26137 - protein, 14 aa, BK virus
TGVDAITEVECFLN

SEQ ID NO: 26138 - protein, 14 aa, BK virus
GVDAITEVECFLNP

SEQ ID NO: 26139 - protein, 14 aa, BK virus
VDAITEVECFLNPE

SEQ ID NO: 26140 - protein, 14 aa, BK virus
DAITEVECFLNPEM

SEQ ID NO: 26141 - protein, 14 aa, BK virus
AITEVECFLNPEMG

SEQ ID NO: 26142 - protein, 14 aa, BK virus
ITEVECFLNPEMGD

SEQ ID NO: 26143 - protein, 14 aa, BK virus
TEVECFLNPEMGDP

SEQ ID NO: 26144 - protein, 14 aa, BK virus
EVECFLNPEMGDPD

SEQ ID NO: 26145 - protein, 14 aa, BK virus
VECFLNPEMGDPDE

SEQ ID NO: 26146 - protein, 14 aa, BK virus
ECFLNPEMGDPDEN

SEQ ID NO: 26147 - protein, 14 aa, BK virus
CFLNPEMGDPDENL

SEQ ID NO: 26148 - protein, 14 aa, BK virus
FLNPEMGDPDENLR

SEQ ID NO: 26149 - protein, 14 aa, BK virus
LNPEMGDPDENLRG

SEQ ID NO: 26150 - protein, 14 aa, BK virus
NPEMGDPDENLRGF

SEQ ID NO: 26151 - protein, 14 aa, BK virus
PEMGDPDENLRGFS

SEQ ID NO: 26152 - protein, 14 aa, BK virus
EMGDPDENLRGFSL

SEQ ID NO: 26153 - protein, 14 aa, BK virus
MGDPDENLRGFSLK

SEQ ID NO: 26154 - protein, 14 aa, BK virus
GDPDENLRGFSLKL

SEQ ID NO: 26155 - protein, 14 aa, BK virus
DPDENLRGFSLKLS

SEQ ID NO: 26156 - protein, 14 aa, BK virus
PDENLRGFSLKLSA

SEQ ID NO: 26157 - protein, 14 aa, BK virus
DENLRGFSLKLSAE

SEQ ID NO: 26158 - protein, 14 aa, BK virus
ENLRGFSLKLSAEN

SEQ ID NO: 26159 - protein, 14 aa, BK virus
NLRGFSLKLSAEND

SEQ ID NO: 26160 - protein, 14 aa, BK virus
LRGFSLKLSAENDF

SEQ ID NO: 26161 - protein, 14 aa, BK virus
RGFSLKLSAENDFS

SEQ ID NO: 26162 - protein, 14 aa, BK virus
GFSLKLSAENDFSS

SEQ ID NO: 26163 - protein, 14 aa, BK virus
FSLKLSAENDFSSD

SEQ ID NO: 26164 - protein, 14 aa, BK virus
SLKLSAENDFSSDS

SEQ ID NO: 26165 - protein, 14 aa, BK virus
LKLSAENDFSSDSP

SEQ ID NO: 26166 - protein, 14 aa, BK virus
KLSAENDFSSDSPE

SEQ ID NO: 26167 - protein, 14 aa, BK virus
LSAENDFSSDSPER

SEQ ID NO: 26168 - protein, 14 aa, BK virus
SAENDFSSDSPERK

SEQ ID NO: 26169 - protein, 14 aa, BK virus
AENDFSSDSPERKM

SEQ ID NO: 26170 - protein, 14 aa, BK virus
ENDFSSDSPERKML

SEQ ID NO: 26171 - protein, 14 aa, BK virus
NDFSSDSPERKMLP

SEQ ID NO: 26172 - protein, 14 aa, BK virus
DFSSDSPERKMLPC

SEQ ID NO: 26173 - protein, 14 aa, BK virus
FSSDSPERKMLPCY

SEQ ID NO: 26174 - protein, 14 aa, BK virus
SSDSPERKMLPCYS

SEQ ID NO: 26175 - protein, 14 aa, BK virus
SDSPERKMLPCYST

SEQ ID NO: 26176 - protein, 14 aa, BK virus
DSPERKMLPCYSTA

SEQ ID NO: 26177 - protein, 14 aa, BK virus
SPERKMLPCYSTAR

SEQ ID NO: 26178 - protein, 14 aa, BK virus
PERKMLPCYSTARI

SEQ ID NO: 26179 - protein, 14 aa, BK virus
ERKMLPCYSTARIP

SEQ ID NO: 26180 - protein, 14 aa, BK virus
RKMLPCYSTARIPL

SEQ ID NO: 26181 - protein, 14 aa, BK virus
KMLPCYSTARIPLP

SEQ ID NO: 26182 - protein, 14 aa, BK virus
MLPCYSTARIPLPN

SEQ ID NO: 26183 - protein, 14 aa, BK virus
LPCYSTARIPLPNL

SEQ ID NO: 26184 - protein, 14 aa, BK virus
PCYSTARIPLPNLN

SEQ ID NO: 26185 - protein, 14 aa, BK virus
CYSTARIPLPNLNE

SEQ ID NO: 26186 - protein, 14 aa, BK virus
YSTARIPLPNLNED

SEQ ID NO: 26187 - protein, 14 aa, BK virus
STARIPLPNLNEDL

SEQ ID NO: 26188 - protein, 14 aa, BK virus
TARIPLPNLNEDLT

SEQ ID NO: 26189 - protein, 14 aa, BK virus
ARIPLPNLNEDLTC

SEQ ID NO: 26190 - protein, 14 aa, BK virus
RIPLPNLNEDLTCG

SEQ ID NO: 26191 - protein, 14 aa, BK virus
IPLPNLNEDLTCGN

SEQ ID NO: 26192 - protein, 14 aa, BK virus
PLPNLNEDLTCGNL

SEQ ID NO: 26193 - protein, 14 aa, BK virus
LPNLNEDLTCGNLL

SEQ ID NO: 26194 - protein, 14 aa, BK virus
PNLNEDLTCGNLLM

SEQ ID NO: 26195 - protein, 14 aa, BK virus
NLNEDLTCGNLLMW

SEQ ID NO: 26196 - protein, 14 aa, BK virus
LNEDLTCGNLLMWE

SEQ ID NO: 26197 - protein, 14 aa, BK virus
NEDLTCGNLLMWEA

SEQ ID NO: 26198 - protein, 14 aa, BK virus
EDLTCGNLLMWEAV

SEQ ID NO: 26199 - protein, 14 aa, BK virus
DLTCGNLLMWEAVT

SEQ ID NO: 26200 - protein, 14 aa, BK virus
LTCGNLLMWEAVTV

SEQ ID NO: 26201 - protein, 14 aa, BK virus
TCGNLLMWEAVTVQ

SEQ ID NO: 26202 - protein, 14 aa, BK virus
CGNLLMWEAVTVQT

SEQ ID NO: 26203 - protein, 14 aa, BK virus
GNLLMWEAVTVQTE

SEQ ID NO: 26204 - protein, 14 aa, BK virus
NLLMWEAVTVQTEV

SEQ ID NO: 26205 - protein, 14 aa, BK virus
LLMWEAVTVQTEVI

SEQ ID NO: 26206 - protein, 14 aa, BK virus
LMWEAVTVQTEVIG

SEQ ID NO: 26207 - protein, 14 aa, BK virus
MWEAVTVQTEVIGI

SEQ ID NO: 26208 - protein, 14 aa, BK virus
WEAVTVQTEVIGIT

SEQ ID NO: 26209 - protein, 14 aa, BK virus
EAVTVQTEVIGITS

SEQ ID NO: 26210 - protein, 14 aa, BK virus
AVTVQTEVIGITSM

SEQ ID NO: 26211 - protein, 14 aa, BK virus
VTVQTEVIGITSML

SEQ ID NO: 26212 - protein, 14 aa, BK virus
TVQTEVIGITSMLN

SEQ ID NO: 26213 - protein, 14 aa, BK virus
VQTEVIGITSMLNL

SEQ ID NO: 26214 - protein, 14 aa, BK virus
QTEVIGITSMLNLH

SEQ ID NO: 26215 - protein, 14 aa, BK virus
TEVIGITSMLNLHA

SEQ ID NO: 26216 - protein, 14 aa, BK virus
EVIGITSMLNLHAG

SEQ ID NO: 26217 - protein, 14 aa, BK virus
VIGITSMLNLHAGS

SEQ ID NO: 26218 - protein, 14 aa, BK virus
IGITSMLNLHAGSQ

SEQ ID NO: 26219 - protein, 14 aa, BK virus
GITSMLNLHAGSQK

SEQ ID NO: 26220 - protein, 14 aa, BK virus
ITSMLNLHAGSQKV

SEQ ID NO: 26221 - protein, 14 aa, BK virus
TSMLNLHAGSQKVH

SEQ ID NO: 26222 - protein, 14 aa, BK virus
SMLNLHAGSQKVHE

SEQ ID NO: 26223 - protein, 14 aa, BK virus
MLNLHAGSQKVHEH

SEQ ID NO: 26224 - protein, 14 aa, BK virus
LNLHAGSQKVHEHG

SEQ ID NO: 26225 - protein, 14 aa, BK virus
NLHAGSQKVHEHGG

SEQ ID NO: 26226 - protein, 14 aa, BK virus
LHAGSQKVHEHGGG

SEQ ID NO: 26227 - protein, 14 aa, BK virus
HAGSQKVHEHGGGK

SEQ ID NO: 26228 - protein, 14 aa, BK virus
AGSQKVHEHGGGKP

SEQ ID NO: 26229 - protein, 14 aa, BK virus
GSQKVHEHGGGKPI

SEQ ID NO: 26230 - protein, 14 aa, BK virus
SQKVHEHGGGKPIQ

SEQ ID NO: 26231 - protein, 14 aa, BK virus
QKVHEHGGGKPIQG

SEQ ID NO: 26232 - protein, 14 aa, BK virus
KVHEHGGGKPIQGS

SEQ ID NO: 26233 - protein, 14 aa, BK virus
VHEHGGGKPIQGSN

SEQ ID NO: 26234 - protein, 14 aa, BK virus
HEHGGGKPIQGSNF

SEQ ID NO: 26235 - protein, 14 aa, BK virus
EHGGGKPIQGSNFH

SEQ ID NO: 26236 - protein, 14 aa, BK virus
HGGGKPIQGSNFHF

SEQ ID NO: 26237 - protein, 14 aa, BK virus
GGGKPIQGSNFHFF

SEQ ID NO: 26238 - protein, 14 aa, BK virus
GGKPIQGSNFHFFA

SEQ ID NO: 26239 - protein, 14 aa, BK virus
GKPIQGSNFHFFAV

SEQ ID NO: 26240 - protein, 14 aa, BK virus
KPIQGSNFHFFAVG

SEQ ID NO: 26241 - protein, 14 aa, BK virus
PIQGSNFHFFAVGG

SEQ ID NO: 26242 - protein, 14 aa, BK virus
IQGSNFHFFAVGGE

SEQ ID NO: 26243 - protein, 14 aa, BK virus
QGSNFHFFAVGGEP

SEQ ID NO: 26244 - protein, 14 aa, BK virus
GSNFHFFAVGGEPL

SEQ ID NO: 26245 - protein, 14 aa, BK virus
SNFHFFAVGGEPLE

SEQ ID NO: 26246 - protein, 14 aa, BK virus
NFHFFAVGGEPLEM

SEQ ID NO: 26247 - protein, 14 aa, BK virus
FHFFAVGGEPLEMQ

SEQ ID NO: 26248 - protein, 14 aa, BK virus
HFFAVGGEPLEMQG

SEQ ID NO: 26249 - protein, 14 aa, BK virus
FFAVGGEPLEMQGV

SEQ ID NO: 26250 - protein, 14 aa, BK virus
FAVGGEPLEMQGVL

SEQ ID NO: 26251 - protein, 14 aa, BK virus
AVGGEPLEMQGVLM

SEQ ID NO: 26252 - protein, 14 aa, BK virus
VGGEPLEMQGVLMN

SEQ ID NO: 26253 - protein, 14 aa, BK virus
GGEPLEMQGVLMNY

SEQ ID NO: 26254 - protein, 14 aa, BK virus
GEPLEMQGVLMNYR

SEQ ID NO: 26255 - protein, 14 aa, BK virus
EPLEMQGVLMNYRS

SEQ ID NO: 26256 - protein, 14 aa, BK virus
PLEMQGVLMNYRSK

SEQ ID NO: 26257 - protein, 14 aa, BK virus
LEMQGVLMNYRSKY

SEQ ID NO: 26258 - protein, 14 aa, BK virus
EMQGVLMNYRSKYP

SEQ ID NO: 26259 - protein, 14 aa, BK virus
MQGVLMNYRSKYPD

SEQ ID NO: 26260 - protein, 14 aa, BK virus
QGVLMNYRSKYPDG

SEQ ID NO: 26261 - protein, 14 aa, BK virus
GVLMNYRSKYPDGT

SEQ ID NO: 26262 - protein, 14 aa, BK virus
VLMNYRSKYPDGTI

SEQ ID NO: 26263 - protein, 14 aa, BK virus
LMNYRSKYPDGTIT

SEQ ID NO: 26264 - protein, 14 aa, BK virus
MNYRSKYPDGTITP

SEQ ID NO: 26265 - protein, 14 aa, BK virus
NYRSKYPDGTITPK

SEQ ID NO: 26266 - protein, 14 aa, BK virus
YRSKYPDGTITPKN

SEQ ID NO: 26267 - protein, 14 aa, BK virus
RSKYPDGTITPKNP

SEQ ID NO: 26268 - protein, 14 aa, BK virus
SKYPDGTITPKNPT

SEQ ID NO: 26269 - protein, 14 aa, BK virus
KYPDGTITPKNPTA

SEQ ID NO: 26270 - protein, 14 aa, BK virus
YPDGTITPKNPTAQ

SEQ ID NO: 26271 - protein, 14 aa, BK virus
PDGTITPKNPTAQS

SEQ ID NO: 26272 - protein, 14 aa, BK virus
DGTITPKNPTAQSQ

SEQ ID NO: 26273 - protein, 14 aa, BK virus
GTITPKNPTAQSQV

SEQ ID NO: 26274 - protein, 14 aa, BK virus
TITPKNPTAQSQVM

SEQ ID NO: 26275 - protein, 14 aa, BK virus
ITPKNPTAQSQVMN

SEQ ID NO: 26276 - protein, 14 aa, BK virus
TPKNPTAQSQVMNT

SEQ ID NO: 26277 - protein, 14 aa, BK virus
PKNPTAQSQVMNTD

SEQ ID NO: 26278 - protein, 14 aa, BK virus
KNPTAQSQVMNTDH

SEQ ID NO: 26279 - protein, 14 aa, BK virus
NPTAQSQVMNTDHK

SEQ ID NO: 26280 - protein, 14 aa, BK virus
PTAQSQVMNTDHKA

SEQ ID NO: 26281 - protein, 14 aa, BK virus
TAQSQVMNTDHKAY

SEQ ID NO: 26282 - protein, 14 aa, BK virus
AQSQVMNTDHKAYL

SEQ ID NO: 26283 - protein, 14 aa, BK virus
QSQVMNTDHKAYLD

SEQ ID NO: 26284 - protein, 14 aa, BK virus
SQVMNTDHKAYLDK

SEQ ID NO: 26285 - protein, 14 aa, BK virus
QVMNTDHKAYLDKN

SEQ ID NO: 26286 - protein, 14 aa, BK virus
VMNTDHKAYLDKNN

SEQ ID NO: 26287 - protein, 14 aa, BK virus
MNTDHKAYLDKNNA

SEQ ID NO: 26288 - protein, 14 aa, BK virus
NTDHKAYLDKNNAY

SEQ ID NO: 26289 - protein, 14 aa, BK virus
TDHKAYLDKNNAYP

SEQ ID NO: 26290 - protein, 14 aa, BK virus
DHKAYLDKNNAYPV

SEQ ID NO: 26291 - protein, 14 aa, BK virus
HKAYLDKNNAYPVE

SEQ ID NO: 26292 - protein, 14 aa, BK virus
KAYLDKNNAYPVEC

SEQ ID NO: 26293 - protein, 14 aa, BK virus
AYLDKNNAYPVECW

SEQ ID NO: 26294 - protein, 14 aa, BK virus
YLDKNNAYPVECWV

SEQ ID NO: 26295 - protein, 14 aa, BK virus
LDKNNAYPVECWVP

SEQ ID NO: 26296 - protein, 14 aa, BK virus
DKNNAYPVECWVPD

SEQ ID NO: 26297 - protein, 14 aa, BK virus
KNNAYPVECWVPDP

SEQ ID NO: 26298 - protein, 14 aa, BK virus
NNAYPVECWVPDPS

SEQ ID NO: 26299 - protein, 14 aa, BK virus
NAYPVECWVPDPSR

SEQ ID NO: 26300 - protein, 14 aa, BK virus
AYPVECWVPDPSRN

SEQ ID NO: 26301 - protein, 14 aa, BK virus
YPVECWVPDPSRNE

SEQ ID NO: 26302 - protein, 14 aa, BK virus
PVECWVPDPSRNEN

SEQ ID NO: 26303 - protein, 14 aa, BK virus
VECWVPDPSRNENA

SEQ ID NO: 26304 - protein, 14 aa, BK virus
ECWVPDPSRNENAR

SEQ ID NO: 26305 - protein, 14 aa, BK virus
CWVPDPSRNENARY

SEQ ID NO: 26306 - protein, 14 aa, BK virus
WVPDPSRNENARYF

SEQ ID NO: 26307 - protein, 14 aa, BK virus
VPDPSRNENARYFG

SEQ ID NO: 26308 - protein, 14 aa, BK virus
PDPSRNENARYFGT

SEQ ID NO: 26309 - protein, 14 aa, BK virus
DPSRNENARYFGTF

SEQ ID NO: 26310 - protein, 14 aa, BK virus
PSRNENARYFGTFT

SEQ ID NO: 26311 - protein, 14 aa, BK virus
SRNENARYFGTFTG

SEQ ID NO: 26312 - protein, 14 aa, BK virus
RNENARYFGTFTGG

SEQ ID NO: 26313 - protein, 14 aa, BK virus
NENARYFGTFTGGE

SEQ ID NO: 26314 - protein, 14 aa, BK virus
ENARYFGTFTGGEN

SEQ ID NO: 26315 - protein, 14 aa, BK virus
NARYFGTFTGGENV

SEQ ID NO: 26316 - protein, 14 aa, BK virus
ARYFGTFTGGENVP

SEQ ID NO: 26317 - protein, 14 aa, BK virus
RYFGTFTGGENVPP

SEQ ID NO: 26318 - protein, 14 aa, BK virus
YFGTFTGGENVPPV

SEQ ID NO: 26319 - protein, 14 aa, BK virus
FGTFTGGENVPPVL

SEQ ID NO: 26320 - protein, 14 aa, BK virus
GTFTGGENVPPVLH

SEQ ID NO: 26321 - protein, 14 aa, BK virus
TFTGGENVPPVLHV

SEQ ID NO: 26322 - protein, 14 aa, BK virus
FTGGENVPPVLHVT

SEQ ID NO: 26323 - protein, 14 aa, BK virus
TGGENVPPVLHVTN

SEQ ID NO: 26324 - protein, 14 aa, BK virus
GGENVPPVLHVTNT

SEQ ID NO: 26325 - protein, 14 aa, BK virus
GENVPPVLHVTNTA

SEQ ID NO: 26326 - protein, 14 aa, BK virus
ENVPPVLHVTNTAT

SEQ ID NO: 26327 - protein, 14 aa, BK virus
NVPPVLHVTNTATT

SEQ ID NO: 26328 - protein, 14 aa, BK virus
VPPVLHVTNTATTV

SEQ ID NO: 26329 - protein, 14 aa, BK virus
PPVLHVTNTATTVL

SEQ ID NO: 26330 - protein, 14 aa, BK virus
PVLHVTNTATTVLL

SEQ ID NO: 26331 - protein, 14 aa, BK virus
VLHVTNTATTVLLD

SEQ ID NO: 26332 - protein, 14 aa, BK virus
LHVTNTATTVLLDE

SEQ ID NO: 26333 - protein, 14 aa, BK virus
HVTNTATTVLLDEQ

SEQ ID NO: 26334 - protein, 14 aa, BK virus
VTNTATTVLLDEQG

SEQ ID NO: 26335 - protein, 14 aa, BK virus
TNTATTVLLDEQGV

SEQ ID NO: 26336 - protein, 14 aa, BK virus
NTATTVLLDEQGVG

SEQ ID NO: 26337 - protein, 14 aa, BK virus
TATTVLLDEQGVGP

SEQ ID NO: 26338 - protein, 14 aa, BK virus
ATTVLLDEQGVGPL

SEQ ID NO: 26339 - protein, 14 aa, BK virus
TTVLLDEQGVGPLC

SEQ ID NO: 26340 - protein, 14 aa, BK virus
TVLLDEQGVGPLCK

SEQ ID NO: 26341 - protein, 14 aa, BK virus
VLLDEQGVGPLCKA

SEQ ID NO: 26342 - protein, 14 aa, BK virus
LLDEQGVGPLCKAD

SEQ ID NO: 26343 - protein, 14 aa, BK virus
LDEQGVGPLCKADS

SEQ ID NO: 26344 - protein, 14 aa, BK virus
DEQGVGPLCKADSL

SEQ ID NO: 26345 - protein, 14 aa, BK virus
EQGVGPLCKADSLY

SEQ ID NO: 26346 - protein, 14 aa, BK virus
QGVGPLCKADSLYV

SEQ ID NO: 26347 - protein, 14 aa, BK virus
GVGPLCKADSLYVS

SEQ ID NO: 26348 - protein, 14 aa, BK virus
VGPLCKADSLYVSA

SEQ ID NO: 26349 - protein, 14 aa, BK virus
GPLCKADSLYVSAA

SEQ ID NO: 26350 - protein, 14 aa, BK virus
PLCKADSLYVSAAD

SEQ ID NO: 26351 - protein, 14 aa, BK virus
LCKADSLYVSAADI

SEQ ID NO: 26352 - protein, 14 aa, BK virus
CKADSLYVSAADIC

SEQ ID NO: 26353 - protein, 14 aa, BK virus
KADSLYVSAADICG

SEQ ID NO: 26354 - protein, 14 aa, BK virus
ADSLYVSAADICGL

SEQ ID NO: 26355 - protein, 14 aa, BK virus
DSLYVSAADICGLF

SEQ ID NO: 26356 - protein, 14 aa, BK virus
SLYVSAADICGLFT

SEQ ID NO: 26357 - protein, 14 aa, BK virus
LYVSAADICGLFTN

SEQ ID NO: 26358 - protein, 14 aa, BK virus
YVSAADICGLFTNS

SEQ ID NO: 26359 - protein, 14 aa, BK virus
VSAADICGLFTNSS

SEQ ID NO: 26360 - protein, 14 aa, BK virus
SAADICGLFTNSSG

SEQ ID NO: 26361 - protein, 14 aa, BK virus
AADICGLFTNSSGT

SEQ ID NO: 26362 - protein, 14 aa, BK virus
ADICGLFTNSSGTQ

SEQ ID NO: 26363 - protein, 14 aa, BK virus
DICGLFTNSSGTQQ

SEQ ID NO: 26364 - protein, 14 aa, BK virus
ICGLFTNSSGTQQW

SEQ ID NO: 26365 - protein, 14 aa, BK virus
CGLFTNSSGTQQWR

SEQ ID NO: 26366 - protein, 14 aa, BK virus
GLFTNSSGTQQWRG

SEQ ID NO: 26367 - protein, 14 aa, BK virus
LFTNSSGTQQWRGL

SEQ ID NO: 26368 - protein, 14 aa, BK virus
FTNSSGTQQWRGLA

SEQ ID NO: 26369 - protein, 14 aa, BK virus
TNSSGTQQWRGLAR

SEQ ID NO: 26370 - protein, 14 aa, BK virus
NSSGTQQWRGLARY

SEQ ID NO: 26371 - protein, 14 aa, BK virus
SSGTQQWRGLARYF

SEQ ID NO: 26372 - protein, 14 aa, BK virus
SGTQQWRGLARYFK

SEQ ID NO: 26373 - protein, 14 aa, BK virus
GTQQWRGLARYFKI

SEQ ID NO: 26374 - protein, 14 aa, BK virus
TQQWRGLARYFKIR

SEQ ID NO: 26375 - protein, 14 aa, BK virus
QQWRGLARYFKIRL

SEQ ID NO: 26376 - protein, 14 aa, BK virus
QWRGLARYFKIRLR

SEQ ID NO: 26377 - protein, 14 aa, BK virus
WRGLARYFKIRLRK

SEQ ID NO: 26378 - protein, 14 aa, BK virus
RGLARYFKIRLRKR

SEQ ID NO: 26379 - protein, 14 aa, BK virus
GLARYFKIRLRKRS

SEQ ID NO: 26380 - protein, 14 aa, BK virus
LARYFKIRLRKRSV

SEQ ID NO: 26381 - protein, 14 aa, BK virus
ARYFKIRLRKRSVK

SEQ ID NO: 26382 - protein, 14 aa, BK virus
RYFKIRLRKRSVKN

SEQ ID NO: 26383 - protein, 14 aa, BK virus
YFKIRLRKRSVKNP

SEQ ID NO: 26384 - protein, 14 aa, BK virus
FKIRLRKRSVKNPY

SEQ ID NO: 26385 - protein, 14 aa, BK virus
KIRLRKRSVKNPYP

SEQ ID NO: 26386 - protein, 14 aa, BK virus
IRLRKRSVKNPYPI

SEQ ID NO: 26387 - protein, 14 aa, BK virus
RLRKRSVKNPYPIS

SEQ ID NO: 26388 - protein, 14 aa, BK virus
LRKRSVKNPYPISF

SEQ ID NO: 26389 - protein, 14 aa, BK virus
RKRSVKNPYPISFL

SEQ ID NO: 26390 - protein, 14 aa, BK virus
KRSVKNPYPISFLL

SEQ ID NO: 26391 - protein, 14 aa, BK virus
RSVKNPYPISFLLS

SEQ ID NO: 26392 - protein, 14 aa, BK virus
SVKNPYPISFLLSD

SEQ ID NO: 26393 - protein, 14 aa, BK virus
VKNPYPISFLLSDL

SEQ ID NO: 26394 - protein, 14 aa, BK virus
KNPYPISFLLSDLI

SEQ ID NO: 26395 - protein, 14 aa, BK virus
NPYPISFLLSDLIN

SEQ ID NO: 26396 - protein, 14 aa, BK virus
PYPISFLLSDLINR

SEQ ID NO: 26397 - protein, 14 aa, BK virus
YPISFLLSDLINRR

SEQ ID NO: 26398 - protein, 14 aa, BK virus
PISFLLSDLINRRT

SEQ ID NO: 26399 - protein, 14 aa, BK virus
ISFLLSDLINRRTQ

SEQ ID NO: 26400 - protein, 14 aa, BK virus
SFLLSDLINRRTQR

SEQ ID NO: 26401 - protein, 14 aa, BK virus
FLLSDLINRRTQRV

SEQ ID NO: 26402 - protein, 14 aa, BK virus
LLSDLINRRTQRVD

SEQ ID NO: 26403 - protein, 14 aa, BK virus
LSDLINRRTQRVDG

SEQ ID NO: 26404 - protein, 14 aa, BK virus
SDLINRRTQRVDGQ

SEQ ID NO: 26405 - protein, 14 aa, BK virus
DLINRRTQRVDGQP

SEQ ID NO: 26406 - protein, 14 aa, BK virus
LINRRTQRVDGQPM

SEQ ID NO: 26407 - protein, 14 aa, BK virus
INRRTQRVDGQPMY

SEQ ID NO: 26408 - protein, 14 aa, BK virus
NRRTQRVDGQPMYG

SEQ ID NO: 26409 - protein, 14 aa, BK virus
RRTQRVDGQPMYGM

SEQ ID NO: 26410 - protein, 14 aa, BK virus
RTQRVDGQPMYGME

SEQ ID NO: 26411 - protein, 14 aa, BK virus
TQRVDGQPMYGMES

SEQ ID NO: 26412 - protein, 14 aa, BK virus
QRVDGQPMYGMESQ

SEQ ID NO: 26413 - protein, 14 aa, BK virus
RVDGQPMYGMESQV

SEQ ID NO: 26414 - protein, 14 aa, BK virus
VDGQPMYGMESQVE

SEQ ID NO: 26415 - protein, 14 aa, BK virus
DGQPMYGMESQVEE

SEQ ID NO: 26416 - protein, 14 aa, BK virus
GQPMYGMESQVEEV

SEQ ID NO: 26417 - protein, 14 aa, BK virus
QPMYGMESQVEEVR

SEQ ID NO: 26418 - protein, 14 aa, BK virus
PMYGMESQVEEVRV

SEQ ID NO: 26419 - protein, 14 aa, BK virus
MYGMESQVEEVRVF

SEQ ID NO: 26420 - protein, 14 aa, BK virus
YGMESQVEEVRVFD

SEQ ID NO: 26421 - protein, 14 aa, BK virus
GMESQVEEVRVFDG

SEQ ID NO: 26422 - protein, 14 aa, BK virus
MESQVEEVRVFDGT

SEQ ID NO: 26423 - protein, 14 aa, BK virus
ESQVEEVRVFDGTE

SEQ ID NO: 26424 - protein, 14 aa, BK virus
SQVEEVRVFDGTER

SEQ ID NO: 26425 - protein, 14 aa, BK virus
QVEEVRVFDGTERL

SEQ ID NO: 26426 - protein, 14 aa, BK virus
VEEVRVFDGTERLP

SEQ ID NO: 26427 - protein, 14 aa, BK virus
EEVRVFDGTERLPG

SEQ ID NO: 26428 - protein, 14 aa, BK virus
EVRVFDGTERLPGD

SEQ ID NO: 26429 - protein, 14 aa, BK virus
VRVFDGTERLPGDP

SEQ ID NO: 26430 - protein, 14 aa, BK virus
RVFDGTERLPGDPD

SEQ ID NO: 26431 - protein, 14 aa, BK virus
VFDGTERLPGDPDM

SEQ ID NO: 26432 - protein, 14 aa, BK virus
FDGTERLPGDPDMI

SEQ ID NO: 26433 - protein, 14 aa, BK virus
DGTERLPGDPDMIR

SEQ ID NO: 26434 - protein, 14 aa, BK virus
GTERLPGDPDMIRY

SEQ ID NO: 26435 - protein, 14 aa, BK virus
TERLPGDPDMIRYI

SEQ ID NO: 26436 - protein, 14 aa, BK virus
ERLPGDPDMIRYID

SEQ ID NO: 26437 - protein, 14 aa, BK virus
RLPGDPDMIRYIDK

SEQ ID NO: 26438 - protein, 14 aa, BK virus
LPGDPDMIRYIDKQ

SEQ ID NO: 26439 - protein, 14 aa, BK virus
PGDPDMIRYIDKQG

SEQ ID NO: 26440 - protein, 14 aa, BK virus
GDPDMIRYIDKQGQ

SEQ ID NO: 26441 - protein, 14 aa, BK virus
DPDMIRYIDKQGQL

SEQ ID NO: 26442 - protein, 14 aa, BK virus
PDMIRYIDKQGQLQ

SEQ ID NO: 26443 - protein, 14 aa, BK virus
DMIRYIDKQGQLQT

SEQ ID NO: 26444 - protein, 14 aa, BK virus
MIRYIDKQGQLQTK

SEQ ID NO: 26445 - protein, 14 aa, BK virus
IRYIDKQGQLQTKM

SEQ ID NO: 26446 - protein, 14 aa, BK virus
RYIDKQGQLQTKML

SEQ ID NO: 26447 - protein, 14 aa, BK virus
TGAFIVHIHLINAA

SEQ ID NO: 26448 - protein, 14 aa, BK virus
GAFIVHIHLINAAF

SEQ ID NO: 26449 - protein, 14 aa, BK virus
AFIVHIHLINAAFV

SEQ ID NO: 26450 - protein, 14 aa, BK virus
ATFKLVLFWGWCFR

SEQ ID NO: 26451 - protein, 14 aa, BK virus
TFKLVLFWGWCFRP

SEQ ID NO: 26452 - protein, 14 aa, BK virus
FKLVLFWGWCFRPF

SEQ ID NO: 26453 - protein, 14 aa, BK virus
KLVLFWGWCFRPFK

SEQ ID NO: 26454 - protein, 14 aa, BK virus
LVLFWGWCFRPFKT

SEQ ID NO: 26455 - protein, 14 aa, BK virus
VLFWGWCFRPFKTL

SEQ ID NO: 26456 - protein, 14 aa, BK virus
LFWGWCFRPFKTLK

SEQ ID NO: 26457 - protein, 14 aa, BK virus
FWGWCFRPFKTLKA

SEQ ID NO: 26458 - protein, 14 aa, BK virus
WGWCFRPFKTLKAF

SEQ ID NO: 26459 - protein, 14 aa, BK virus
GWCFRPFKTLKAFT

SEQ ID NO: 26460 - protein, 14 aa, BK virus
WCFRPFKTLKAFTQ

SEQ ID NO: 26461 - protein, 14 aa, BK virus
CFRPFKTLKAFTQM

SEQ ID NO: 26462 - protein, 14 aa, BK virus
FRPFKTLKAFTQMQ

SEQ ID NO: 26463 - protein, 14 aa, BK virus
RPFKTLKAFTQMQL

SEQ ID NO: 26464 - protein, 14 aa, BK virus
PFKTLKAFTQMQLL

SEQ ID NO: 26465 - protein, 14 aa, BK virus
FKTLKAFTQMQLLT

SEQ ID NO: 26466 - protein, 14 aa, BK virus
KTLKAFTQMQLLTM

SEQ ID NO: 26467 - protein, 14 aa, BK virus
TLKAFTQMQLLTMG

SEQ ID NO: 26468 - protein, 14 aa, BK virus
LKAFTQMQLLTMGV

SEQ ID NO: 26469 - protein, 14 aa, BK virus
ILFSCNIKNTFPHA

SEQ ID NO: 26470 - protein, 14 aa, BK virus
LFSCNIKNTFPHAY

SEQ ID NO: 26471 - protein, 14 aa, BK virus
FSCNIKNTFPHAYI

SEQ ID NO: 26472 - protein, 14 aa, BK virus
SCNIKNTFPHAYII

SEQ ID NO: 26473 - protein, 14 aa, BK virus
CNIKNTFPHAYIIF

SEQ ID NO: 26474 - protein, 14 aa, BK virus
NIKNTFPHAYIIFH

SEQ ID NO: 26475 - protein, 14 aa, BK virus
IKNTFPHAYIIFHP

SEQ ID NO: 26476 - protein, 14 aa, BK virus
KSIHTYLRIQPFLP

SEQ ID NO: 26477 - protein, 14 aa, BK virus
SIHTYLRIQPFLPF

SEQ ID NO: 26478 - protein, 14 aa, BK virus
IHTYLRIQPFLPFN

SEQ ID NO: 26479 - protein, 14 aa, BK virus
HTYLRIQPFLPFNN

SEQ ID NO: 26480 - protein, 14 aa, BK virus
TYLRIQPFLPFNNS

SEQ ID NO: 26481 - protein, 14 aa, BK virus
YLRIQPFLPFNNSR

SEQ ID NO: 26482 - protein, 14 aa, BK virus
LRIQPFLPFNNSRL

SEQ ID NO: 26483 - protein, 14 aa, BK virus
RIQPFLPFNNSRLY

SEQ ID NO: 26484 - protein, 14 aa, BK virus
IQPFLPFNNSRLYI

SEQ ID NO: 26485 - protein, 14 aa, BK virus
QPFLPFNNSRLYIS

SEQ ID NO: 26486 - protein, 14 aa, BK virus
PFLPFNNSRLYISC

SEQ ID NO: 26487 - protein, 14 aa, BK virus
FLPFNNSRLYISCK

SEQ ID NO: 26488 - protein, 14 aa, BK virus
LPFNNSRLYISCKI

SEQ ID NO: 26489 - protein, 14 aa, BK virus
PFNNSRLYISCKIS

SEQ ID NO: 26490 - protein, 14 aa, BK virus
FNNSRLYISCKISY

SEQ ID NO: 26491 - protein, 14 aa, BK virus
NNSRLYISCKISYR

SEQ ID NO: 26492 - protein, 14 aa, BK virus
NSRLYISCKISYRP

SEQ ID NO: 26493 - protein, 14 aa, BK virus
SRLYISCKISYRPK

SEQ ID NO: 26494 - protein, 14 aa, BK virus
RLYISCKISYRPKP

SEQ ID NO: 26495 - protein, 14 aa, BK virus
LYISCKISYRPKPN

SEQ ID NO: 26496 - protein, 14 aa, BK virus
IYFGPKIYLSYKSS

SEQ ID NO: 26497 - protein, 14 aa, BK virus
YFGPKIYLSYKSSL

SEQ ID NO: 26498 - protein, 14 aa, BK virus
FGPKIYLSYKSSLQ

SEQ ID NO: 26499 - protein, 14 aa, BK virus
GPKIYLSYKSSLQG

SEQ ID NO: 26500 - protein, 14 aa, BK virus
PKIYLSYKSSLQGF

SEQ ID NO: 26501 - protein, 14 aa, BK virus
KIYLSYKSSLQGFR

SEQ ID NO: 26502 - protein, 14 aa, BK virus
IYLSYKSSLQGFRD

SEQ ID NO: 26503 - protein, 14 aa, BK virus
YLSYKSSLQGFRDR

SEQ ID NO: 26504 - protein, 14 aa, BK virus
LSYKSSLQGFRDRI

SEQ ID NO: 26505 - protein, 14 aa, BK virus
SYKSSLQGFRDRIL

SEQ ID NO: 26506 - protein, 14 aa, BK virus
YKSSLQGFRDRILI

SEQ ID NO: 26507 - protein, 14 aa, BK virus
KSSLQGFRDRILIH

SEQ ID NO: 26508 - protein, 14 aa, BK virus
SSLQGFRDRILIHC

SEQ ID NO: 26509 - protein, 14 aa, BK virus
SLQGFRDRILIHCN

SEQ ID NO: 26510 - protein, 14 aa, BK virus
LQGFRDRILIHCNQ

SEQ ID NO: 26511 - protein, 14 aa, BK virus
QGFRDRILIHCNQA

SEQ ID NO: 26512 - protein, 14 aa, BK virus
GFRDRILIHCNQAW

SEQ ID NO: 26513 - protein, 14 aa, BK virus
FRDRILIHCNQAWW

SEQ ID NO: 26514 - protein, 14 aa, BK virus
RDRILIHCNQAWWK

SEQ ID NO: 26515 - protein, 14 aa, BK virus
DRILIHCNQAWWKY

SEQ ID NO: 26516 - protein, 14 aa, BK virus
RILIHCNQAWWKYL

SEQ ID NO: 26517 - protein, 14 aa, BK virus
ILIHCNQAWWKYLG

SEQ ID NO: 26518 - protein, 14 aa, BK virus
LIHCNQAWWKYLGS

SEQ ID NO: 26519 - protein, 14 aa, BK virus
IHCNQAWWKYLGSF

SEQ ID NO: 26520 - protein, 14 aa, BK virus
HCNQAWWKYLGSFV

SEQ ID NO: 26521 - protein, 14 aa, BK virus
FSSCPFYIFKNNHV

SEQ ID NO: 26522 - protein, 14 aa, BK virus
SSCPFYIFKNNHVL

SEQ ID NO: 26523 - protein, 14 aa, BK virus
SCPFYIFKNNHVLI

SEQ ID NO: 26524 - protein, 14 aa, BK virus
CPFYIFKNNHVLIY

SEQ ID NO: 26525 - protein, 14 aa, BK virus
PFYIFKNNHVLIYS

SEQ ID NO: 26526 - protein, 14 aa, BK virus
FYIFKNNHVLIYSY

SEQ ID NO: 26527 - protein, 14 aa, BK virus
YIFKNNHVLIYSYT

SEQ ID NO: 26528 - protein, 14 aa, BK virus
PVSSFRYIENNTVQ

SEQ ID NO: 26529 - protein, 14 aa, BK virus
VSSFRYIENNTVQK

SEQ ID NO: 26530 - protein, 14 aa, BK virus
SSFRYIENNTVQKI

SEQ ID NO: 26531 - protein, 14 aa, BK virus
SFRYIENNTVQKIK

SEQ ID NO: 26532 - protein, 14 aa, BK virus
FRYIENNTVQKIKY

SEQ ID NO: 26533 - protein, 14 aa, BK virus
RYIENNTVQKIKYY

SEQ ID NO: 26534 - protein, 14 aa, BK virus
YIENNTVQKIKYYR

SEQ ID NO: 26535 - protein, 14 aa, BK virus
IENNTVQKIKYYRI

SEQ ID NO: 26536 - protein, 14 aa, BK virus
ENNTVQKIKYYRIH

SEQ ID NO: 26537 - protein, 14 aa, BK virus
NNTVQKIKYYRIHF

SEQ ID NO: 26538 - protein, 14 aa, BK virus
NTVQKIKYYRIHFR

SEQ ID NO: 26539 - protein, 14 aa, BK virus
HFFPGHMKGIYSFF

SEQ ID NO: 26540 - protein, 14 aa, BK virus
FFPGHMKGIYSFFS

SEQ ID NO: 26541 - protein, 14 aa, BK virus
NCIYCLLTNTFLIF

SEQ ID NO: 26542 - protein, 14 aa, BK virus
CIYCLLTNTFLIFT

SEQ ID NO: 26543 - protein, 14 aa, BK virus
IYCLLTNTFLIFTF

SEQ ID NO: 26544 - protein, 14 aa, BK virus
YCLLTNTFLIFTFC

SEQ ID NO: 26545 - protein, 14 aa, BK virus
CLLTNTFLIFTFCK

SEQ ID NO: 26546 - protein, 14 aa, BK virus
LLTNTFLIFTFCKN

SEQ ID NO: 26547 - protein, 14 aa, BK virus
LTNTFLIFTFCKNN

SEQ ID NO: 26548 - protein, 14 aa, BK virus
TNTFLIFTFCKNNS

SEQ ID NO: 26549 - protein, 14 aa, BK virus
NTFLIFTFCKNNSI

SEQ ID NO: 26550 - protein, 14 aa, BK virus
TFLIFTFCKNNSIC

SEQ ID NO: 26551 - protein, 14 aa, BK virus
FLIFTFCKNNSICK

SEQ ID NO: 26552 - protein, 14 aa, BK virus
LIFTFCKNNSICKV

SEQ ID NO: 26553 - protein, 14 aa, BK virus
IFTFCKNNSICKVL

SEQ ID NO: 26554 - protein, 14 aa, BK virus
FTFCKNNSICKVLF

SEQ ID NO: 26555 - protein, 14 aa, BK virus
TFCKNNSICKVLFM

SEQ ID NO: 26556 - protein, 14 aa, BK virus
FCKNNSICKVLFMI

SEQ ID NO: 26557 - protein, 14 aa, BK virus
CKNNSICKVLFMIL

SEQ ID NO: 26558 - protein, 14 aa, BK virus
KNNSICKVLFMILK

SEQ ID NO: 26559 - protein, 14 aa, BK virus
NNSICKVLFMILKV

SEQ ID NO: 26560 - protein, 14 aa, BK virus
NSICKVLFMILKVI

SEQ ID NO: 26561 - protein, 14 aa, BK virus
SICKVLFMILKVIR

SEQ ID NO: 26562 - protein, 14 aa, BK virus
ICKVLFMILKVIRL

SEQ ID NO: 26563 - protein, 14 aa, BK virus
CKVLFMILKVIRLV

SEQ ID NO: 26564 - protein, 14 aa, BK virus
KVLFMILKVIRLVF

SEQ ID NO: 26565 - protein, 14 aa, BK virus
VLFMILKVIRLVFF

SEQ ID NO: 26566 - protein, 14 aa, BK virus
LFMILKVIRLVFFL

SEQ ID NO: 26567 - protein, 14 aa, BK virus
FMILKVIRLVFFLT

SEQ ID NO: 26568 - protein, 14 aa, BK virus
MILKVIRLVFFLTL

SEQ ID NO: 26569 - protein, 14 aa, BK virus
ILKVIRLVFFLTLF

SEQ ID NO: 26570 - protein, 14 aa, BK virus
LKVIRLVFFLTLFT

SEQ ID NO: 26571 - protein, 14 aa, BK virus
KVIRLVFFLTLFTL

SEQ ID NO: 26572 - protein, 14 aa, BK virus
VIRLVFFLTLFTLL

SEQ ID NO: 26573 - protein, 14 aa, BK virus
IRLVFFLTLFTLLY

SEQ ID NO: 26574 - protein, 14 aa, BK virus
RLVFFLTLFTLLYI

SEQ ID NO: 26575 - protein, 14 aa, BK virus
LVFFLTLFTLLYIV

SEQ ID NO: 26576 - protein, 14 aa, BK virus
VFFLTLFTLLYIVL

SEQ ID NO: 26577 - protein, 14 aa, BK virus
FFLTLFTLLYIVLK

SEQ ID NO: 26578 - protein, 14 aa, BK virus
FLTLFTLLYIVLKF

SEQ ID NO: 26579 - protein, 14 aa, BK virus
KHILTLCLYCILSN

SEQ ID NO: 26580 - protein, 14 aa, BK virus
FPRHLLCFFRLFWA

SEQ ID NO: 26581 - protein, 14 aa, BK virus
PRHLLCFFRLFWAK

SEQ ID NO: 26582 - protein, 14 aa, BK virus
RHLLCFFRLFWAKI

SEQ ID NO: 26583 - protein, 14 aa, BK virus
HLLCFFRLFWAKIM

SEQ ID NO: 26584 - protein, 14 aa, BK virus
LLCFFRLFWAKIML

SEQ ID NO: 26585 - protein, 14 aa, BK virus
LCFFRLFWAKIMLL

SEQ ID NO: 26586 - protein, 14 aa, BK virus
APLNAFFYSMVWIS

SEQ ID NO: 26587 - protein, 14 aa, BK virus
PLNAFFYSMVWISS

SEQ ID NO: 26588 - protein, 14 aa, BK virus
KTKGTQLLTEIINC

SEQ ID NO: 26589 - protein, 14 aa, BK virus
TKGTQLLTEIINCR

SEQ ID NO: 26590 - protein, 14 aa, BK virus
KGTQLLTEIINCRN

SEQ ID NO: 26591 - protein, 14 aa, BK virus
GTQLLTEIINCRNS

SEQ ID NO: 26592 - protein, 14 aa, BK virus
TQLLTEIINCRNSM

SEQ ID NO: 26593 - protein, 14 aa, BK virus
QLLTEIINCRNSMS

SEQ ID NO: 26594 - protein, 14 aa, BK virus
LLTEIINCRNSMSM

SEQ ID NO: 26595 - protein, 14 aa, BK virus
LTEIINCRNSMSMW

SEQ ID NO: 26596 - protein, 14 aa, BK virus
TEIINCRNSMSMWS

SEQ ID NO: 26597 - protein, 14 aa, BK virus
KEYNIMPSTHVSTN

SEQ ID NO: 26598 - protein, 14 aa, BK virus
EYNIMPSTHVSTNK

SEQ ID NO: 26599 - protein, 14 aa, BK virus
YNIMPSTHVSTNKS

SEQ ID NO: 26600 - protein, 14 aa, BK virus
NIMPSTHVSTNKSY

SEQ ID NO: 26601 - protein, 14 aa, BK virus
IMPSTHVSTNKSYR

SEQ ID NO: 26602 - protein, 14 aa, BK virus
MPSTHVSTNKSYRI

SEQ ID NO: 26603 - protein, 14 aa, BK virus
PSTHVSTNKSYRIF

SEQ ID NO: 26604 - protein, 14 aa, BK virus
STHVSTNKSYRIFF

SEQ ID NO: 26605 - protein, 14 aa, BK virus
THVSTNKSYRIFFH

SEQ ID NO: 26606 - protein, 14 aa, BK virus
HVSTNKSYRIFFHK

SEQ ID NO: 26607 - protein, 14 aa, BK virus
VSTNKSYRIFFHKF

SEQ ID NO: 26608 - protein, 14 aa, BK virus
STNKSYRIFFHKFF

SEQ ID NO: 26609 - protein, 14 aa, BK virus
TNKSYRIFFHKFFI

SEQ ID NO: 26610 - protein, 14 aa, BK virus
NKSYRIFFHKFFIQ

SEQ ID NO: 26611 - protein, 14 aa, BK virus
KSYRIFFHKFFIQN

SEQ ID NO: 26612 - protein, 14 aa, BK virus
SYRIFFHKFFIQNL

SEQ ID NO: 26613 - protein, 14 aa, BK virus
YRIFFHKFFIQNLS

SEQ ID NO: 26614 - protein, 14 aa, BK virus
RIFFHKFFIQNLSF

SEQ ID NO: 26615 - protein, 14 aa, BK virus
IFFHKFFIQNLSFF

SEQ ID NO: 26616 - protein, 14 aa, BK virus
FFHKFFIQNLSFFF

SEQ ID NO: 26617 - protein, 14 aa, BK virus
FHKFFIQNLSFFFS

SEQ ID NO: 26618 - protein, 14 aa, BK virus
HKFFIQNLSFFFSS

SEQ ID NO: 26619 - protein, 14 aa, BK virus
KFFIQNLSFFFSSI

SEQ ID NO: 26620 - protein, 14 aa, BK virus
FFIQNLSFFFSSIH

SEQ ID NO: 26621 - protein, 14 aa, BK virus
FIQNLSFFFSSIHS

SEQ ID NO: 26622 - protein, 14 aa, BK virus
IQNLSFFFSSIHSK

SEQ ID NO: 26623 - protein, 14 aa, BK virus
QNLSFFFSSIHSKA

SEQ ID NO: 26624 - protein, 14 aa, BK virus
NLSFFFSSIHSKAG

SEQ ID NO: 26625 - protein, 14 aa, BK virus
LSFFFSSIHSKAGK

SEQ ID NO: 26626 - protein, 14 aa, BK virus
SFFFSSIHSKAGKG

SEQ ID NO: 26627 - protein, 14 aa, BK virus
FFFSSIHSKAGKGS

SEQ ID NO: 26628 - protein, 14 aa, BK virus
FFSSIHSKAGKGSI

SEQ ID NO: 26629 - protein, 14 aa, BK virus
FSSIHSKAGKGSIT

SEQ ID NO: 26630 - protein, 14 aa, BK virus
SSIHSKAGKGSITK

SEQ ID NO: 26631 - protein, 14 aa, BK virus
SIHSKAGKGSITKY

SEQ ID NO: 26632 - protein, 14 aa, BK virus
IHSKAGKGSITKYS

SEQ ID NO: 26633 - protein, 14 aa, BK virus
HSKAGKGSITKYSL

SEQ ID NO: 26634 - protein, 14 aa, BK virus
SKAGKGSITKYSLT

SEQ ID NO: 26635 - protein, 14 aa, BK virus
KAGKGSITKYSLTK

SEQ ID NO: 26636 - protein, 14 aa, BK virus
AGKGSITKYSLTKK

SEQ ID NO: 26637 - protein, 14 aa, BK virus
GKGSITKYSLTKKL

SEQ ID NO: 26638 - protein, 14 aa, BK virus
KGSITKYSLTKKLV

SEQ ID NO: 26639 - protein, 14 aa, BK virus
IRGKVFRVFYLSFF

SEQ ID NO: 26640 - protein, 14 aa, BK virus
RGKVFRVFYLSFFF

SEQ ID NO: 26641 - protein, 14 aa, BK virus
GKVFRVFYLSFFFG

SEQ ID NO: 26642 - protein, 14 aa, BK virus
KVFRVFYLSFFFGW

SEQ ID NO: 26643 - protein, 14 aa, BK virus
VFRVFYLSFFFGWC

SEQ ID NO: 26644 - protein, 14 aa, BK virus
VLRICCCFFITGKH

SEQ ID NO: 26645 - protein, 14 aa, BK virus
LRICCCFFITGKHI

SEQ ID NO: 26646 - protein, 14 aa, BK virus
RICCCFFITGKHIF

SEQ ID NO: 26647 - protein, 14 aa, BK virus
ICCCFFITGKHIFM

SEQ ID NO: 26648 - protein, 14 aa, BK virus
CCCFFITGKHIFMA

SEQ ID NO: 26649 - protein, 14 aa, BK virus
CCFFITGKHIFMAK

SEQ ID NO: 26650 - protein, 14 aa, BK virus
IFIPFFIKGTPPGL

SEQ ID NO: 26651 - protein, 14 aa, BK virus
FIPFFIKGTPPGLP

SEQ ID NO: 26652 - protein, 14 aa, BK virus
IPFFIKGTPPGLPL

SEQ ID NO: 26653 - protein, 14 aa, BK virus
PFFIKGTPPGLPLF

SEQ ID NO: 26654 - protein, 14 aa, BK virus
FFIKGTPPGLPLFC

SEQ ID NO: 26655 - protein, 14 aa, BK virus
FIKGTPPGLPLFCS

SEQ ID NO: 26656 - protein, 14 aa, BK virus
IKGTPPGLPLFCSI

SEQ ID NO: 26657 - protein, 14 aa, BK virus
KGTPPGLPLFCSIG

SEQ ID NO: 26658 - protein, 14 aa, BK virus
GTPPGLPLFCSIGW

SEQ ID NO: 26659 - protein, 14 aa, BK virus
TPPGLPLFCSIGWH

SEQ ID NO: 26660 - protein, 14 aa, BK virus
PPGLPLFCSIGWHL

SEQ ID NO: 26661 - protein, 14 aa, BK virus
SFRSLKGVSPIIWT

SEQ ID NO: 26662 - protein, 14 aa, BK virus
FRSLKGVSPIIWTH

SEQ ID NO: 26663 - protein, 14 aa, BK virus
RSLKGVSPIIWTHH

SEQ ID NO: 26664 - protein, 14 aa, BK virus
SLKGVSPIIWTHHC

SEQ ID NO: 26665 - protein, 14 aa, BK virus
LKGVSPIIWTHHCR

SEQ ID NO: 26666 - protein, 14 aa, BK virus
KGVSPIIWTHHCRV

SEQ ID NO: 26667 - protein, 14 aa, BK virus
GVSPIIWTHHCRVS

SEQ ID NO: 26668 - protein, 14 aa, BK virus
VSPIIWTHHCRVSS

SEQ ID NO: 26669 - protein, 14 aa, BK virus
SPIIWTHHCRVSSV

SEQ ID NO: 26670 - protein, 14 aa, BK virus
PIIWTHHCRVSSVR

SEQ ID NO: 26671 - protein, 14 aa, BK virus
IIWTHHCRVSSVRS

SEQ ID NO: 26672 - protein, 14 aa, BK virus
IWTHHCRVSSVRSK

SEQ ID NO: 26673 - protein, 14 aa, BK virus
WTHHCRVSSVRSKP

SEQ ID NO: 26674 - protein, 14 aa, BK virus
THHCRVSSVRSKPN

SEQ ID NO: 26675 - protein, 14 aa, BK virus
HHCRVSSVRSKPNH

SEQ ID NO: 26676 - protein, 14 aa, BK virus
HCRVSSVRSKPNHC

SEQ ID NO: 26677 - protein, 14 aa, BK virus
CRVSSVRSKPNHCV

SEQ ID NO: 26678 - protein, 14 aa, BK virus
RVSSVRSKPNHCVK

SEQ ID NO: 26679 - protein, 14 aa, BK virus
VSSVRSKPNHCVKQ

SEQ ID NO: 26680 - protein, 14 aa, BK virus
SSVRSKPNHCVKQS

SEQ ID NO: 26681 - protein, 14 aa, BK virus
SVRSKPNHCVKQSM

SEQ ID NO: 26682 - protein, 14 aa, BK virus
VRSKPNHCVKQSMQ

SEQ ID NO: 26683 - protein, 14 aa, BK virus
QSIQTKGSFLKNFL

SEQ ID NO: 26684 - protein, 14 aa, BK virus
SIQTKGSFLKNFLF

SEQ ID NO: 26685 - protein, 14 aa, BK virus
IQTKGSFLKNFLFK

SEQ ID NO: 26686 - protein, 14 aa, BK virus
QTKGSFLKNFLFKC

SEQ ID NO: 26687 - protein, 14 aa, BK virus
TKGSFLKNFLFKCL

SEQ ID NO: 26688 - protein, 14 aa, BK virus
KGSFLKNFLFKCLN

SEQ ID NO: 26689 - protein, 14 aa, BK virus
GSFLKNFLFKCLNL

SEQ ID NO: 26690 - protein, 14 aa, BK virus
SFLKNFLFKCLNLS

SEQ ID NO: 26691 - protein, 14 aa, BK virus
HSMQGQCTEGFLEQ

SEQ ID NO: 26692 - protein, 14 aa, BK virus
SMQGQCTEGFLEQI

SEQ ID NO: 26693 - protein, 14 aa, BK virus
MQGQCTEGFLEQIG

SEQ ID NO: 26694 - protein, 14 aa, BK virus
QGQCTEGFLEQIGH

SEQ ID NO: 26695 - protein, 14 aa, BK virus
GQCTEGFLEQIGHS

SEQ ID NO: 26696 - protein, 14 aa, BK virus
QCTEGFLEQIGHSL

SEQ ID NO: 26697 - protein, 14 aa, BK virus
CTEGFLEQIGHSLQ

SEQ ID NO: 26698 - protein, 14 aa, BK virus
TEGFLEQIGHSLQY

SEQ ID NO: 26699 - protein, 14 aa, BK virus
EGFLEQIGHSLQYR

SEQ ID NO: 26700 - protein, 14 aa, BK virus
GFLEQIGHSLQYRV

SEQ ID NO: 26701 - protein, 14 aa, BK virus
FLEQIGHSLQYRVS

SEQ ID NO: 26702 - protein, 14 aa, BK virus
LEQIGHSLQYRVSG

SEQ ID NO: 26703 - protein, 14 aa, BK virus
EQIGHSLQYRVSGQ

SEQ ID NO: 26704 - protein, 14 aa, BK virus
QIGHSLQYRVSGQR

SEQ ID NO: 26705 - protein, 14 aa, BK virus
IGHSLQYRVSGQRG

SEQ ID NO: 26706 - protein, 14 aa, BK virus
GHSLQYRVSGQRGK

SEQ ID NO: 26707 - protein, 14 aa, BK virus
HSLQYRVSGQRGKS

SEQ ID NO: 26708 - protein, 14 aa, BK virus
SLQYRVSGQRGKSA

SEQ ID NO: 26709 - protein, 14 aa, BK virus
LQYRVSGQRGKSAQ

SEQ ID NO: 26710 - protein, 14 aa, BK virus
QYRVSGQRGKSAQT

SEQ ID NO: 26711 - protein, 14 aa, BK virus
YRVSGQRGKSAQTS

SEQ ID NO: 26712 - protein, 14 aa, BK virus
RVSGQRGKSAQTSE

SEQ ID NO: 26713 - protein, 14 aa, BK virus
VSGQRGKSAQTSEL

SEQ ID NO: 26714 - protein, 14 aa, BK virus
SGQRGKSAQTSELL

SEQ ID NO: 26715 - protein, 14 aa, BK virus
GQRGKSAQTSELLQ

SEQ ID NO: 26716 - protein, 14 aa, BK virus
QRGKSAQTSELLQV

SEQ ID NO: 26717 - protein, 14 aa, BK virus
RGKSAQTSELLQVP

SEQ ID NO: 26718 - protein, 14 aa, BK virus
GKSAQTSELLQVPK

SEQ ID NO: 26719 - protein, 14 aa, BK virus
KSAQTSELLQVPKS

SEQ ID NO: 26720 - protein, 14 aa, BK virus
SAQTSELLQVPKSG

SEQ ID NO: 26721 - protein, 14 aa, BK virus
ATFTSCSIFLYKVF

SEQ ID NO: 26722 - protein, 14 aa, BK virus
TFTSCSIFLYKVFI

SEQ ID NO: 26723 - protein, 14 aa, BK virus
FTSCSIFLYKVFIL

SEQ ID NO: 26724 - protein, 14 aa, BK virus
TSCSIFLYKVFILF

SEQ ID NO: 26725 - protein, 14 aa, BK virus
SCSIFLYKVFILFI

SEQ ID NO: 26726 - protein, 14 aa, BK virus
CSIFLYKVFILFIL

SEQ ID NO: 26727 - protein, 14 aa, BK virus
SIFLYKVFILFILS

SEQ ID NO: 26728 - protein, 14 aa, BK virus
IFLYKVFILFILSS

SEQ ID NO: 26729 - protein, 14 aa, BK virus
FLYKVFILFILSSS

SEQ ID NO: 26730 - protein, 14 aa, BK virus
LYKVFILFILSSSP

SEQ ID NO: 26731 - protein, 14 aa, BK virus
YKVFILFILSSSPP

SEQ ID NO: 26732 - protein, 14 aa, BK virus
KVFILFILSSSPPL

SEQ ID NO: 26733 - protein, 14 aa, BK virus
VFILFILSSSPPLS

SEQ ID NO: 26734 - protein, 14 aa, BK virus
FILFILSSSPPLSG

SEQ ID NO: 26735 - protein, 14 aa, BK virus
AFLIKGRFPQAALS

SEQ ID NO: 26736 - protein, 14 aa, BK virus
FLIKGRFPQAALSR

SEQ ID NO: 26737 - protein, 14 aa, BK virus
LIKGRFPQAALSRP

SEQ ID NO: 26738 - protein, 14 aa, BK virus
IKGRFPQAALSRPK

SEQ ID NO: 26739 - protein, 14 aa, BK virus
KGRFPQAALSRPKR

SEQ ID NO: 26740 - protein, 14 aa, BK virus
GRFPQAALSRPKRS

SEQ ID NO: 26741 - protein, 14 aa, BK virus
RFPQAALSRPKRSM

SEQ ID NO: 26742 - protein, 14 aa, BK virus
FPQAALSRPKRSMS

SEQ ID NO: 26743 - protein, 14 aa, BK virus
PQAALSRPKRSMSS

SEQ ID NO: 26744 - protein, 14 aa, BK virus
QAALSRPKRSMSSM

SEQ ID NO: 26745 - protein, 14 aa, BK virus
AALSRPKRSMSSMD

SEQ ID NO: 26746 - protein, 14 aa, BK virus
ALSRPKRSMSSMDS

SEQ ID NO: 26747 - protein, 14 aa, BK virus
LSRPKRSMSSMDSS

SEQ ID NO: 26748 - protein, 14 aa, BK virus
SRPKRSMSSMDSSL

SEQ ID NO: 26749 - protein, 14 aa, BK virus
RPKRSMSSMDSSLL

SEQ ID NO: 26750 - protein, 14 aa, BK virus
PKRSMSSMDSSLLR

SEQ ID NO: 26751 - protein, 14 aa, BK virus
KRSMSSMDSSLLRT

SEQ ID NO: 26752 - protein, 14 aa, BK virus
RSMSSMDSSLLRTL

SEQ ID NO: 26753 - protein, 14 aa, BK virus
SMSSMDSSLLRTLS

SEQ ID NO: 26754 - protein, 15 aa, BK virus
FCKNCKRIGISPNSF

SEQ ID NO: 26755 - protein, 15 aa, BK virus
CKNCKRIGISPNSFA

SEQ ID NO: 26756 - protein, 15 aa, BK virus
KNCKRIGISPNSFAR

SEQ ID NO: 26757 - protein, 15 aa, BK virus
NCKRIGISPNSFARP

SEQ ID NO: 26758 - protein, 15 aa, BK virus
CKRIGISPNSFARPQ

SEQ ID NO: 26759 - protein, 15 aa, BK virus
KRIGISPNSFARPQK

SEQ ID NO: 26760 - protein, 15 aa, BK virus
RIGISPNSFARPQKK

SEQ ID NO: 26761 - protein, 15 aa, BK virus
IGISPNSFARPQKKP

SEQ ID NO: 26762 - protein, 15 aa, BK virus
GISPNSFARPQKKPP

SEQ ID NO: 26763 - protein, 15 aa, BK virus
ISPNSFARPQKKPPH

SEQ ID NO: 26764 - protein, 15 aa, BK virus
SPNSFARPQKKPPHP

SEQ ID NO: 26765 - protein, 15 aa, BK virus
PNSFARPQKKPPHPY

SEQ ID NO: 26766 - protein, 15 aa, BK virus
NSFARPQKKPPHPYY

SEQ ID NO: 26767 - protein, 15 aa, BK virus
SFARPQKKPPHPYYL

SEQ ID NO: 26768 - protein, 15 aa, BK virus
FARPQKKPPHPYYLR

SEQ ID NO: 26769 - protein, 15 aa, BK virus
ARPQKKPPHPYYLRE

SEQ ID NO: 26770 - protein, 15 aa, BK virus
RPQKKPPHPYYLRER

SEQ ID NO: 26771 - protein, 15 aa, BK virus
PQKKPPHPYYLRERV

SEQ ID NO: 26772 - protein, 15 aa, BK virus
QKKPPHPYYLRERVE

SEQ ID NO: 26773 - protein, 15 aa, BK virus
KKPPHPYYLRERVEA

SEQ ID NO: 26774 - protein, 15 aa, BK virus
KPPHPYYLRERVEAE

SEQ ID NO: 26775 - protein, 15 aa, BK virus
PPHPYYLRERVEAEA

SEQ ID NO: 26776 - protein, 15 aa, BK virus
PHPYYLRERVEAEAA

SEQ ID NO: 26777 - protein, 15 aa, BK virus
HPYYLRERVEAEAAS

SEQ ID NO: 26778 - protein, 15 aa, BK virus
PYYLRERVEAEAASA

SEQ ID NO: 26779 - protein, 15 aa, BK virus
YYLRERVEAEAASAS

SEQ ID NO: 26780 - protein, 15 aa, BK virus
YLRERVEAEAASASY

SEQ ID NO: 26781 - protein, 15 aa, BK virus
LRERVEAEAASASYI

SEQ ID NO: 26782 - protein, 15 aa, BK virus
RERVEAEAASASYIL

SEQ ID NO: 26783 - protein, 15 aa, BK virus
KKRPQGGAAYPWNAA

SEQ ID NO: 26784 - protein, 15 aa, BK virus
KRPQGGAAYPWNAAK

SEQ ID NO: 26785 - protein, 15 aa, BK virus
RPQGGAAYPWNAAKP

SEQ ID NO: 26786 - protein, 15 aa, BK virus
PQEGKCMTHRGMQPN

SEQ ID NO: 26787 - protein, 15 aa, BK virus
QEGKCMTHRGMQPNH

SEQ ID NO: 26788 - protein, 15 aa, BK virus
EGKCMTHRGMQPNHD

SEQ ID NO: 26789 - protein, 15 aa, BK virus
GKCMTHRGMQPNHDL

SEQ ID NO: 26790 - protein, 15 aa, BK virus
KCMTHRGMQPNHDLR

SEQ ID NO: 26791 - protein, 15 aa, BK virus
CMTHRGMQPNHDLRK

SEQ ID NO: 26792 - protein, 15 aa, BK virus
MTHRGMQPNHDLRKE

SEQ ID NO: 26793 - protein, 15 aa, BK virus
THRGMQPNHDLRKES

SEQ ID NO: 26794 - protein, 15 aa, BK virus
HRGMQPNHDLRKESA

SEQ ID NO: 26795 - protein, 15 aa, BK virus
LTGRSCLPMECSQTM

SEQ ID NO: 26796 - protein, 15 aa, BK virus
TGRSCLPMECSQTMT

SEQ ID NO: 26797 - protein, 15 aa, BK virus
GRSCLPMECSQTMTS

SEQ ID NO: 26798 - protein, 15 aa, BK virus
RSCLPMECSQTMTSG

SEQ ID NO: 26799 - protein, 15 aa, BK virus
SCLPMECSQTMTSGR

SEQ ID NO: 26800 - protein, 15 aa, BK virus
CLPMECSQTMTSGRK

SEQ ID NO: 26801 - protein, 15 aa, BK virus
LPMECSQTMTSGRKV

SEQ ID NO: 26802 - protein, 15 aa, BK virus
PMECSQTMTSGRKVH

SEQ ID NO: 26803 - protein, 15 aa, BK virus
MECSQTMTSGRKVHD

SEQ ID NO: 26804 - protein, 15 aa, BK virus
ECSQTMTSGRKVHDR

SEQ ID NO: 26805 - protein, 15 aa, BK virus
CSQTMTSGRKVHDRH

SEQ ID NO: 26806 - protein, 15 aa, BK virus
SQTMTSGRKVHDRHV

SEQ ID NO: 26807 - protein, 15 aa, BK virus
QTMTSGRKVHDRHVL

SEQ ID NO: 26808 - protein, 15 aa, BK virus
TMTSGRKVHDRHVLR

SEQ ID NO: 26809 - protein, 15 aa, BK virus
MTSGRKVHDRHVLRA

SEQ ID NO: 26810 - protein, 15 aa, BK virus
ESWPCPQLNWTKAMV

SEQ ID NO: 26811 - protein, 15 aa, BK virus
SWPCPQLNWTKAMVL

SEQ ID NO: 26812 - protein, 15 aa, BK virus
WPCPQLNWTKAMVLR

SEQ ID NO: 26813 - protein, 15 aa, BK virus
PCPQLNWTKAMVLRQ

SEQ ID NO: 26814 - protein, 15 aa, BK virus
CPQLNWTKAMVLRQL

SEQ ID NO: 26815 - protein, 15 aa, BK virus
PQLNWTKAMVLRQLS

SEQ ID NO: 26816 - protein, 15 aa, BK virus
QLNWTKAMVLRQLSR

SEQ ID NO: 26817 - protein, 15 aa, BK virus
LNWTKAMVLRQLSRQ

SEQ ID NO: 26818 - protein, 15 aa, BK virus
NWTKAMVLRQLSRQA

SEQ ID NO: 26819 - protein, 15 aa, BK virus
WTKAMVLRQLSRQAS

SEQ ID NO: 26820 - protein, 15 aa, BK virus
TKAMVLRQLSRQASV

SEQ ID NO: 26821 - protein, 15 aa, BK virus
KAMVLRQLSRQASVK

SEQ ID NO: 26822 - protein, 15 aa, BK virus
AMVLRQLSRQASVKV

SEQ ID NO: 26823 - protein, 15 aa, BK virus
MVLRQLSRQASVKVG

SEQ ID NO: 26824 - protein, 15 aa, BK virus
VLRQLSRQASVKVGK

SEQ ID NO: 26825 - protein, 15 aa, BK virus
LRQLSRQASVKVGKT

SEQ ID NO: 26826 - protein, 15 aa, BK virus
RQLSRQASVKVGKTW

SEQ ID NO: 26827 - protein, 15 aa, BK virus
QLSRQASVKVGKTWT

SEQ ID NO: 26828 - protein, 15 aa, BK virus
LSRQASVKVGKTWTG

SEQ ID NO: 26829 - protein, 15 aa, BK virus
SRQASVKVGKTWTGT

SEQ ID NO: 26830 - protein, 15 aa, BK virus
RQASVKVGKTWTGTK

SEQ ID NO: 26831 - protein, 15 aa, BK virus
QASVKVGKTWTGTKK

SEQ ID NO: 26832 - protein, 15 aa, BK virus
ASVKVGKTWTGTKKR

SEQ ID NO: 26833 - protein, 15 aa, BK virus
SVKVGKTWTGTKKRA

SEQ ID NO: 26834 - protein, 15 aa, BK virus
VKVGKTWTGTKKRAQ

SEQ ID NO: 26835 - protein, 15 aa, BK virus
KVGKTWTGTKKRAQR

SEQ ID NO: 26836 - protein, 15 aa, BK virus
VGKTWTGTKKRAQRI

SEQ ID NO: 26837 - protein, 15 aa, BK virus
GKTWTGTKKRAQRIF

SEQ ID NO: 26838 - protein, 15 aa, BK virus
KTWTGTKKRAQRIFI

SEQ ID NO: 26839 - protein, 15 aa, BK virus
TWTGTKKRAQRIFIF

SEQ ID NO: 26840 - protein, 15 aa, BK virus
WTGTKKRAQRIFIFI

SEQ ID NO: 26841 - protein, 15 aa, BK virus
TGTKKRAQRIFIFIL

SEQ ID NO: 26842 - protein, 15 aa, BK virus
GTKKRAQRIFIFILE

SEQ ID NO: 26843 - protein, 15 aa, BK virus
TKKRAQRIFIFILEL

SEQ ID NO: 26844 - protein, 15 aa, BK virus
KKRAQRIFIFILELL

SEQ ID NO: 26845 - protein, 15 aa, BK virus
KRAQRIFIFILELLL

SEQ ID NO: 26846 - protein, 15 aa, BK virus
RAQRIFIFILELLLE

SEQ ID NO: 26847 - protein, 15 aa, BK virus
AQRIFIFILELLLEF

SEQ ID NO: 26848 - protein, 15 aa, BK virus
QRIFIFILELLLEFC

SEQ ID NO: 26849 - protein, 15 aa, BK virus
RIFIFILELLLEFCR

SEQ ID NO: 26850 - protein, 15 aa, BK virus
IFIFILELLLEFCRG

SEQ ID NO: 26851 - protein, 15 aa, BK virus
FIFILELLLEFCRGE

SEQ ID NO: 26852 - protein, 15 aa, BK virus
IFILELLLEFCRGED

SEQ ID NO: 26853 - protein, 15 aa, BK virus
FILELLLEFCRGEDS

SEQ ID NO: 26854 - protein, 15 aa, BK virus
ILELLLEFCRGEDSV

SEQ ID NO: 26855 - protein, 15 aa, BK virus
LELLLEFCRGEDSVD

SEQ ID NO: 26856 - protein, 15 aa, BK virus
ELLLEFCRGEDSVDG

SEQ ID NO: 26857 - protein, 15 aa, BK virus
LLLEFCRGEDSVDGK

SEQ ID NO: 26858 - protein, 15 aa, BK virus
LLEFCRGEDSVDGKN

SEQ ID NO: 26859 - protein, 15 aa, BK virus
LEFCRGEDSVDGKNK

SEQ ID NO: 26860 - protein, 15 aa, BK virus
EFCRGEDSVDGKNKS

SEQ ID NO: 26861 - protein, 15 aa, BK virus
FCRGEDSVDGKNKST

SEQ ID NO: 26862 - protein, 15 aa, BK virus
CRGEDSVDGKNKSTT

SEQ ID NO: 26863 - protein, 15 aa, BK virus
RGEDSVDGKNKSTTA

SEQ ID NO: 26864 - protein, 15 aa, BK virus
GEDSVDGKNKSTTAL

SEQ ID NO: 26865 - protein, 15 aa, BK virus
EDSVDGKNKSTTALP

SEQ ID NO: 26866 - protein, 15 aa, BK virus
DSVDGKNKSTTALPA

SEQ ID NO: 26867 - protein, 15 aa, BK virus
SVDGKNKSTTALPAV

SEQ ID NO: 26868 - protein, 15 aa, BK virus
VDGKNKSTTALPAVK

SEQ ID NO: 26869 - protein, 15 aa, BK virus
DGKNKSTTALPAVKD

SEQ ID NO: 26870 - protein, 15 aa, BK virus
GKNKSTTALPAVKDS

SEQ ID NO: 26871 - protein, 15 aa, BK virus
KNKSTTALPAVKDSV

SEQ ID NO: 26872 - protein, 15 aa, BK virus
NKSTTALPAVKDSVK

SEQ ID NO: 26873 - protein, 15 aa, BK virus
KSTTALPAVKDSVKD

SEQ ID NO: 26874 - protein, 15 aa, BK virus
STTALPAVKDSVKDS

SEQ ID NO: 26875 - protein, 15 aa, BK virus
VSNPFFFVFPGSWVL

SEQ ID NO: 26876 - protein, 15 aa, BK virus
SNPFFFVFPGSWVLL

SEQ ID NO: 26877 - protein, 15 aa, BK virus
LPVYLRLLLPQDFQW

SEQ ID NO: 26878 - protein, 15 aa, BK virus
PVYLRLLLPQDFQWL

SEQ ID NO: 26879 - protein, 15 aa, BK virus
VYLRLLLPQDFQWLK

SEQ ID NO: 26880 - protein, 15 aa, BK virus
YLRLLLPQDFQWLKL

SEQ ID NO: 26881 - protein, 15 aa, BK virus
LRLLLPQDFQWLKLL

SEQ ID NO: 26882 - protein, 15 aa, BK virus
RLLLPQDFQWLKLLL

SEQ ID NO: 26883 - protein, 15 aa, BK virus
LLLPQDFQWLKLLLG

SEQ ID NO: 26884 - protein, 15 aa, BK virus
LLPQDFQWLKLLLGR

SEQ ID NO: 26885 - protein, 15 aa, BK virus
LPQDFQWLKLLLGRL

SEQ ID NO: 26886 - protein, 15 aa, BK virus
PQDFQWLKLLLGRLL

SEQ ID NO: 26887 - protein, 15 aa, BK virus
QDFQWLKLLLGRLLL

SEQ ID NO: 26888 - protein, 15 aa, BK virus
DFQWLKLLLGRLLLL

SEQ ID NO: 26889 - protein, 15 aa, BK virus
ASISNQAWLWNCLTQ

SEQ ID NO: 26890 - protein, 15 aa, BK virus
SISNQAWLWNCLTQM

SEQ ID NO: 26891 - protein, 15 aa, BK virus
ISNQAWLWNCLTQMS

SEQ ID NO: 26892 - protein, 15 aa, BK virus
SNQAWLWNCLTQMST

SEQ ID NO: 26893 - protein, 15 aa, BK virus
NQAWLWNCLTQMSTM

SEQ ID NO: 26894 - protein, 15 aa, BK virus
QAWLWNCLTQMSTMI

SEQ ID NO: 26895 - protein, 15 aa, BK virus
AWLWNCLTQMSTMIF

SEQ ID NO: 26896 - protein, 15 aa, BK virus
WLWNCLTQMSTMIFC

SEQ ID NO: 26897 - protein, 15 aa, BK virus
LWNCLTQMSTMIFCF

SEQ ID NO: 26898 - protein, 15 aa, BK virus
WNCLTQMSTMIFCFL

SEQ ID NO: 26899 - protein, 15 aa, BK virus
NCLTQMSTMIFCFLV

SEQ ID NO: 26900 - protein, 15 aa, BK virus
ILLLIIFNTLILGIG

SEQ ID NO: 26901 - protein, 15 aa, BK virus
LLLIIFNTLILGIGV

SEQ ID NO: 26902 - protein, 15 aa, BK virus
LLIIFNTLILGIGVL

SEQ ID NO: 26903 - protein, 15 aa, BK virus
LIIFNTLILGIGVLL

SEQ ID NO: 26904 - protein, 15 aa, BK virus
IIFNTLILGIGVLLC

SEQ ID NO: 26905 - protein, 15 aa, BK virus
IFNTLILGIGVLLCL

SEQ ID NO: 26906 - protein, 15 aa, BK virus
FNTLILGIGVLLCLL

SEQ ID NO: 26907 - protein, 15 aa, BK virus
NTLILGIGVLLCLLL

SEQ ID NO: 26908 - protein, 15 aa, BK virus
TLILGIGVLLCLLLF

SEQ ID NO: 26909 - protein, 15 aa, BK virus
LILGIGVLLCLLLFP

SEQ ID NO: 26910 - protein, 15 aa, BK virus
ILGIGVLLCLLLFPR

SEQ ID NO: 26911 - protein, 15 aa, BK virus
LGIGVLLCLLLFPRL

SEQ ID NO: 26912 - protein, 15 aa, BK virus
GIGVLLCLLLFPRLC

SEQ ID NO: 26913 - protein, 15 aa, BK virus
IGVLLCLLLFPRLCG

SEQ ID NO: 26914 - protein, 15 aa, BK virus
GVLLCLLLFPRLCGM

SEQ ID NO: 26915 - protein, 15 aa, BK virus
VLLCLLLFPRLCGML

SEQ ID NO: 26916 - protein, 15 aa, BK virus
LLCLLLFPRLCGMLL

SEQ ID NO: 26917 - protein, 15 aa, BK virus
LCLLLFPRLCGMLLG

SEQ ID NO: 26918 - protein, 15 aa, BK virus
CLLLFPRLCGMLLGM

SEQ ID NO: 26919 - protein, 15 aa, BK virus
LLLFPRLCGMLLGMI

SEQ ID NO: 26920 - protein, 15 aa, BK virus
LLFPRLCGMLLGMIY

SEQ ID NO: 26921 - protein, 15 aa, BK virus
LFPRLCGMLLGMIYL

SEQ ID NO: 26922 - protein, 15 aa, BK virus
FPRLCGMLLGMIYLL

SEQ ID NO: 26923 - protein, 15 aa, BK virus
PHRNCREEQKDFLET

SEQ ID NO: 26924 - protein, 15 aa, BK virus
HRNCREEQKDFLETP

SEQ ID NO: 26925 - protein, 15 aa, BK virus
RNCREEQKDFLETPW

SEQ ID NO: 26926 - protein, 15 aa, BK virus
NCREEQKDFLETPWL

SEQ ID NO: 26927 - protein, 15 aa, BK virus
CREEQKDFLETPWLD

SEQ ID NO: 26928 - protein, 15 aa, BK virus
REEQKDFLETPWLDF

SEQ ID NO: 26929 - protein, 15 aa, BK virus
EEQKDFLETPWLDFW

SEQ ID NO: 26930 - protein, 15 aa, BK virus
EQKDFLETPWLDFWR

SEQ ID NO: 26931 - protein, 15 aa, BK virus
QKDFLETPWLDFWRK

SEQ ID NO: 26932 - protein, 15 aa, BK virus
KDFLETPWLDFWRKL

SEQ ID NO: 26933 - protein, 15 aa, BK virus
DFLETPWLDFWRKLP

SEQ ID NO: 26934 - protein, 15 aa, BK virus
FLETPWLDFWRKLPG

SEQ ID NO: 26935 - protein, 15 aa, BK virus
LETPWLDFWRKLPGQ

SEQ ID NO: 26936 - protein, 15 aa, BK virus
ETPWLDFWRKLPGQL

SEQ ID NO: 26937 - protein, 15 aa, BK virus
TFIIIFNNIILIFPL

SEQ ID NO: 26938 - protein, 15 aa, BK virus
FIIIFNNIILIFPLL

SEQ ID NO: 26939 - protein, 15 aa, BK virus
IIIFNNIILIFPLLG

SEQ ID NO: 26940 - protein, 15 aa, BK virus
IIFNNIILIFPLLGP

SEQ ID NO: 26941 - protein, 15 aa, BK virus
IFNNIILIFPLLGPQ

SEQ ID NO: 26942 - protein, 15 aa, BK virus
FNNIILIFPLLGPQW

SEQ ID NO: 26943 - protein, 15 aa, BK virus
NNIILIFPLLGPQWL

SEQ ID NO: 26944 - protein, 15 aa, BK virus
NIILIFPLLGPQWLD

SEQ ID NO: 26945 - protein, 15 aa, BK virus
IILIFPLLGPQWLDK

SEQ ID NO: 26946 - protein, 15 aa, BK virus
LKGKVPVYILAILIV

SEQ ID NO: 26947 - protein, 15 aa, BK virus
KKLLPQEVLIKELLL

SEQ ID NO: 26948 - protein, 15 aa, BK virus
KLLPQEVLIKELLLN

SEQ ID NO: 26949 - protein, 15 aa, BK virus
LLPQEVLIKELLLNG

SEQ ID NO: 26950 - protein, 15 aa, BK virus
LPQEVLIKELLLNGC

SEQ ID NO: 26951 - protein, 15 aa, BK virus
PQEVLIKELLLNGCC

SEQ ID NO: 26952 - protein, 15 aa, BK virus
QEVLIKELLLNGCCL

SEQ ID NO: 26953 - protein, 15 aa, BK virus
EVLIKELLLNGCCLY

SEQ ID NO: 26954 - protein, 15 aa, BK virus
VLIKELLLNGCCLYF

SEQ ID NO: 26955 - protein, 15 aa, BK virus
HLLLKHMKMAPTKRK

SEQ ID NO: 26956 - protein, 15 aa, BK virus
LLLKHMKMAPTKRKG

SEQ ID NO: 26957 - protein, 15 aa, BK virus
LLKHMKMAPTKRKGE

SEQ ID NO: 26958 - protein, 15 aa, BK virus
LKHMKMAPTKRKGEC

SEQ ID NO: 26959 - protein, 15 aa, BK virus
KHMKMAPTKRKGECP

SEQ ID NO: 26960 - protein, 15 aa, BK virus
HMKMAPTKRKGECPG

SEQ ID NO: 26961 - protein, 15 aa, BK virus
MKMAPTKRKGECPGA

SEQ ID NO: 26962 - protein, 15 aa, BK virus
KMAPTKRKGECPGAA

SEQ ID NO: 26963 - protein, 15 aa, BK virus
MAPTKRKGECPGAAP

SEQ ID NO: 26964 - protein, 15 aa, BK virus
APTKRKGECPGAAPK

SEQ ID NO: 26965 - protein, 15 aa, BK virus
PTKRKGECPGAAPKK

SEQ ID NO: 26966 - protein, 15 aa, BK virus
TKRKGECPGAAPKKP

SEQ ID NO: 26967 - protein, 15 aa, BK virus
KRKGECPGAAPKKPK

SEQ ID NO: 26968 - protein, 15 aa, BK virus
RKGECPGAAPKKPKE

SEQ ID NO: 26969 - protein, 15 aa, BK virus
KGECPGAAPKKPKEP

SEQ ID NO: 26970 - protein, 15 aa, BK virus
GECPGAAPKKPKEPV

SEQ ID NO: 26971 - protein, 15 aa, BK virus
ECPGAAPKKPKEPVQ

SEQ ID NO: 26972 - protein, 15 aa, BK virus
CPGAAPKKPKEPVQV

SEQ ID NO: 26973 - protein, 15 aa, BK virus
PGAAPKKPKEPVQVP

SEQ ID NO: 26974 - protein, 15 aa, BK virus
GAAPKKPKEPVQVPK

SEQ ID NO: 26975 - protein, 15 aa, BK virus
AAPKKPKEPVQVPKL

SEQ ID NO: 26976 - protein, 15 aa, BK virus
APKKPKEPVQVPKLL

SEQ ID NO: 26977 - protein, 15 aa, BK virus
PKKPKEPVQVPKLLI

SEQ ID NO: 26978 - protein, 15 aa, BK virus
KKPKEPVQVPKLLIK

SEQ ID NO: 26979 - protein, 15 aa, BK virus
KPKEPVQVPKLLIKG

SEQ ID NO: 26980 - protein, 15 aa, BK virus
PKEPVQVPKLLIKGG

SEQ ID NO: 26981 - protein, 15 aa, BK virus
KEPVQVPKLLIKGGV

SEQ ID NO: 26982 - protein, 15 aa, BK virus
EPVQVPKLLIKGGVE

SEQ ID NO: 26983 - protein, 15 aa, BK virus
PVQVPKLLIKGGVEV

SEQ ID NO: 26984 - protein, 15 aa, BK virus
VQVPKLLIKGGVEVL

SEQ ID NO: 26985 - protein, 15 aa, BK virus
QVPKLLIKGGVEVLE

SEQ ID NO: 26986 - protein, 15 aa, BK virus
VPKLLIKGGVEVLEV

SEQ ID NO: 26987 - protein, 15 aa, BK virus
PKLLIKGGVEVLEVK

SEQ ID NO: 26988 - protein, 15 aa, BK virus
KLLIKGGVEVLEVKT

SEQ ID NO: 26989 - protein, 15 aa, BK virus
LLIKGGVEVLEVKTG

SEQ ID NO: 26990 - protein, 15 aa, BK virus
LIKGGVEVLEVKTGV

SEQ ID NO: 26991 - protein, 15 aa, BK virus
IKGGVEVLEVKTGVD

SEQ ID NO: 26992 - protein, 15 aa, BK virus
KGGVEVLEVKTGVDA

SEQ ID NO: 26993 - protein, 15 aa, BK virus
GGVEVLEVKTGVDAI

SEQ ID NO: 26994 - protein, 15 aa, BK virus
GVEVLEVKTGVDAIT

SEQ ID NO: 26995 - protein, 15 aa, BK virus
VEVLEVKTGVDAITE

SEQ ID NO: 26996 - protein, 15 aa, BK virus
EVLEVKTGVDAITEV

SEQ ID NO: 26997 - protein, 15 aa, BK virus
VLEVKTGVDAITEVE

SEQ ID NO: 26998 - protein, 15 aa, BK virus
LEVKTGVDAITEVEC

SEQ ID NO: 26999 - protein, 15 aa, BK virus
EVKTGVDAITEVECF

SEQ ID NO: 27000 - protein, 15 aa, BK virus
VKTGVDAITEVECFL

SEQ ID NO: 27001 - protein, 15 aa, BK virus
KTGVDAITEVECFLN

SEQ ID NO: 27002 - protein, 15 aa, BK virus
TGVDAITEVECFLNP

SEQ ID NO: 27003 - protein, 15 aa, BK virus
GVDAITEVECFLNPE

SEQ ID NO: 27004 - protein, 15 aa, BK virus
VDAITEVECFLNPEM

SEQ ID NO: 27005 - protein, 15 aa, BK virus
DAITEVECFLNPEMG

SEQ ID NO: 27006 - protein, 15 aa, BK virus
AITEVECFLNPEMGD

SEQ ID NO: 27007 - protein, 15 aa, BK virus
ITEVECFLNPEMGDP

SEQ ID NO: 27008 - protein, 15 aa, BK virus
TEVECFLNPEMGDPD

SEQ ID NO: 27009 - protein, 15 aa, BK virus
EVECFLNPEMGDPDE

SEQ ID NO: 27010 - protein, 15 aa, BK virus
VECFLNPEMGDPDEN

SEQ ID NO: 27011 - protein, 15 aa, BK virus
ECFLNPEMGDPDENL

SEQ ID NO: 27012 - protein, 15 aa, BK virus
CFLNPEMGDPDENLR

SEQ ID NO: 27013 - protein, 15 aa, BK virus
FLNPEMGDPDENLRG

SEQ ID NO: 27014 - protein, 15 aa, BK virus
LNPEMGDPDENLRGF

SEQ ID NO: 27015 - protein, 15 aa, BK virus
NPEMGDPDENLRGFS

SEQ ID NO: 27016 - protein, 15 aa, BK virus
PEMGDPDENLRGFSL

SEQ ID NO: 27017 - protein, 15 aa, BK virus
EMGDPDENLRGFSLK

SEQ ID NO: 27018 - protein, 15 aa, BK virus
MGDPDENLRGFSLKL

SEQ ID NO: 27019 - protein, 15 aa, BK virus
GDPDENLRGFSLKLS

SEQ ID NO: 27020 - protein, 15 aa, BK virus
DPDENLRGFSLKLSA

SEQ ID NO: 27021 - protein, 15 aa, BK virus
PDENLRGFSLKLSAE

SEQ ID NO: 27022 - protein, 15 aa, BK virus
DENLRGFSLKLSAEN

SEQ ID NO: 27023 - protein, 15 aa, BK virus
ENLRGFSLKLSAEND

SEQ ID NO: 27024 - protein, 15 aa, BK virus
NLRGFSLKLSAENDF

SEQ ID NO: 27025 - protein, 15 aa, BK virus
LRGFSLKLSAENDFS

SEQ ID NO: 27026 - protein, 15 aa, BK virus
RGFSLKLSAENDFSS

SEQ ID NO: 27027 - protein, 15 aa, BK virus
GFSLKLSAENDFSSD

SEQ ID NO: 27028 - protein, 15 aa, BK virus
FSLKLSAENDFSSDS

SEQ ID NO: 27029 - protein, 15 aa, BK virus
SLKLSAENDFSSDSP

SEQ ID NO: 27030 - protein, 15 aa, BK virus
LKLSAENDFSSDSPE

SEQ ID NO: 27031 - protein, 15 aa, BK virus
KLSAENDFSSDSPER

SEQ ID NO: 27032 - protein, 15 aa, BK virus
LSAENDFSSDSPERK

SEQ ID NO: 27033 - protein, 15 aa, BK virus
SAENDFSSDSPERKM

SEQ ID NO: 27034 - protein, 15 aa, BK virus
AENDFSSDSPERKML

SEQ ID NO: 27035 - protein, 15 aa, BK virus
ENDFSSDSPERKMLP

SEQ ID NO: 27036 - protein, 15 aa, BK virus
NDFSSDSPERKMLPC

SEQ ID NO: 27037 - protein, 15 aa, BK virus
DFSSDSPERKMLPCY

SEQ ID NO: 27038 - protein, 15 aa, BK virus
FSSDSPERKMLPCYS

SEQ ID NO: 27039 - protein, 15 aa, BK virus
SSDSPERKMLPCYST

SEQ ID NO: 27040 - protein, 15 aa, BK virus
SDSPERKMLPCYSTA

SEQ ID NO: 27041 - protein, 15 aa, BK virus
DSPERKMLPCYSTAR

SEQ ID NO: 27042 - protein, 15 aa, BK virus
SPERKMLPCYSTARI

SEQ ID NO: 27043 - protein, 15 aa, BK virus
PERKMLPCYSTARIP

SEQ ID NO: 27044 - protein, 15 aa, BK virus
ERKMLPCYSTARIPL

SEQ ID NO: 27045 - protein, 15 aa, BK virus
RKMLPCYSTARIPLP

SEQ ID NO: 27046 - protein, 15 aa, BK virus
KMLPCYSTARIPLPN

SEQ ID NO: 27047 - protein, 15 aa, BK virus
MLPCYSTARIPLPNL

SEQ ID NO: 27048 - protein, 15 aa, BK virus
LPCYSTARIPLPNLN

SEQ ID NO: 27049 - protein, 15 aa, BK virus
PCYSTARIPLPNLNE

SEQ ID NO: 27050 - protein, 15 aa, BK virus
CYSTARIPLPNLNED

SEQ ID NO: 27051 - protein, 15 aa, BK virus
YSTARIPLPNLNEDL

SEQ ID NO: 27052 - protein, 15 aa, BK virus
STARIPLPNLNEDLT

SEQ ID NO: 27053 - protein, 15 aa, BK virus
TARIPLPNLNEDLTC

SEQ ID NO: 27054 - protein, 15 aa, BK virus
ARIPLPNLNEDLTCG

SEQ ID NO: 27055 - protein, 15 aa, BK virus
RIPLPNLNEDLTCGN

SEQ ID NO: 27056 - protein, 15 aa, BK virus
IPLPNLNEDLTCGNL

SEQ ID NO: 27057 - protein, 15 aa, BK virus
PLPNLNEDLTCGNLL

SEQ ID NO: 27058 - protein, 15 aa, BK virus
LPNLNEDLTCGNLLM

SEQ ID NO: 27059 - protein, 15 aa, BK virus
PNLNEDLTCGNLLMW

SEQ ID NO: 27060 - protein, 15 aa, BK virus
NLNEDLTCGNLLMWE

SEQ ID NO: 27061 - protein, 15 aa, BK virus
LNEDLTCGNLLMWEA

SEQ ID NO: 27062 - protein, 15 aa, BK virus
NEDLTCGNLLMWEAV

SEQ ID NO: 27063 - protein, 15 aa, BK virus
EDLTCGNLLMWEAVT

SEQ ID NO: 27064 - protein, 15 aa, BK virus
DLTCGNLLMWEAVTV

SEQ ID NO: 27065 - protein, 15 aa, BK virus
LTCGNLLMWEAVTVQ

SEQ ID NO: 27066 - protein, 15 aa, BK virus
TCGNLLMWEAVTVQT

SEQ ID NO: 27067 - protein, 15 aa, BK virus
CGNLLMWEAVTVQTE

SEQ ID NO: 27068 - protein, 15 aa, BK virus
GNLLMWEAVTVQTEV

SEQ ID NO: 27069 - protein, 15 aa, BK virus
NLLMWEAVTVQTEVI

SEQ ID NO: 27070 - protein, 15 aa, BK virus
LLMWEAVTVQTEVIG

SEQ ID NO: 27071 - protein, 15 aa, BK virus
LMWEAVTVQTEVIGI

SEQ ID NO: 27072 - protein, 15 aa, BK virus
MWEAVTVQTEVIGIT

SEQ ID NO: 27073 - protein, 15 aa, BK virus
WEAVTVQTEVIGITS

SEQ ID NO: 27074 - protein, 15 aa, BK virus
EAVTVQTEVIGITSM

SEQ ID NO: 27075 - protein, 15 aa, BK virus
AVTVQTEVIGITSML

SEQ ID NO: 27076 - protein, 15 aa, BK virus
VTVQTEVIGITSMLN

SEQ ID NO: 27077 - protein, 15 aa, BK virus
TVQTEVIGITSMLNL

SEQ ID NO: 27078 - protein, 15 aa, BK virus
VQTEVIGITSMLNLH

SEQ ID NO: 27079 - protein, 15 aa, BK virus
QTEVIGITSMLNLHA

SEQ ID NO: 27080 - protein, 15 aa, BK virus
TEVIGITSMLNLHAG

SEQ ID NO: 27081 - protein, 15 aa, BK virus
EVIGITSMLNLHAGS

SEQ ID NO: 27082 - protein, 15 aa, BK virus
VIGITSMLNLHAGSQ

SEQ ID NO: 27083 - protein, 15 aa, BK virus
IGITSMLNLHAGSQK

SEQ ID NO: 27084 - protein, 15 aa, BK virus
GITSMLNLHAGSQKV

SEQ ID NO: 27085 - protein, 15 aa, BK virus
ITSMLNLHAGSQKVH

SEQ ID NO: 27086 - protein, 15 aa, BK virus
TSMLNLHAGSQKVHE

SEQ ID NO: 27087 - protein, 15 aa, BK virus
SMLNLHAGSQKVHEH

SEQ ID NO: 27088 - protein, 15 aa, BK virus
MLNLHAGSQKVHEHG

SEQ ID NO: 27089 - protein, 15 aa, BK virus
LNLHAGSQKVHEHGG

SEQ ID NO: 27090 - protein, 15 aa, BK virus
NLHAGSQKVHEHGGG

SEQ ID NO: 27091 - protein, 15 aa, BK virus
LHAGSQKVHEHGGGK

SEQ ID NO: 27092 - protein, 15 aa, BK virus
HAGSQKVHEHGGGKP

SEQ ID NO: 27093 - protein, 15 aa, BK virus
AGSQKVHEHGGGKPI

SEQ ID NO: 27094 - protein, 15 aa, BK virus
GSQKVHEHGGGKPIQ

SEQ ID NO: 27095 - protein, 15 aa, BK virus
SQKVHEHGGGKPIQG

SEQ ID NO: 27096 - protein, 15 aa, BK virus
QKVHEHGGGKPIQGS

SEQ ID NO: 27097 - protein, 15 aa, BK virus
KVHEHGGGKPIQGSN

SEQ ID NO: 27098 - protein, 15 aa, BK virus
VHEHGGGKPIQGSNF

SEQ ID NO: 27099 - protein, 15 aa, BK virus
HEHGGGKPIQGSNFH

SEQ ID NO: 27100 - protein, 15 aa, BK virus
EHGGGKPIQGSNFHF

SEQ ID NO: 27101 - protein, 15 aa, BK virus
HGGGKPIQGSNFHFF

SEQ ID NO: 27102 - protein, 15 aa, BK virus
GGGKPIQGSNFHFFA

SEQ ID NO: 27103 - protein, 15 aa, BK virus
GGKPIQGSNFHFFAV

SEQ ID NO: 27104 - protein, 15 aa, BK virus
GKPIQGSNFHFFAVG

SEQ ID NO: 27105 - protein, 15 aa, BK virus
KPIQGSNFHFFAVGG

SEQ ID NO: 27106 - protein, 15 aa, BK virus
PIQGSNFHFFAVGGE

SEQ ID NO: 27107 - protein, 15 aa, BK virus
IQGSNFHFFAVGGEP

SEQ ID NO: 27108 - protein, 15 aa, BK virus
QGSNFHFFAVGGEPL

SEQ ID NO: 27109 - protein, 15 aa, BK virus
GSNFHFFAVGGEPLE

SEQ ID NO: 27110 - protein, 15 aa, BK virus
SNFHFFAVGGEPLEM

SEQ ID NO: 27111 - protein, 15 aa, BK virus
NFHFFAVGGEPLEMQ

SEQ ID NO: 27112 - protein, 15 aa, BK virus
FHFFAVGGEPLEMQG

SEQ ID NO: 27113 - protein, 15 aa, BK virus
HFFAVGGEPLEMQGV

SEQ ID NO: 27114 - protein, 15 aa, BK virus
FFAVGGEPLEMQGVL

SEQ ID NO: 27115 - protein, 15 aa, BK virus
FAVGGEPLEMQGVLM

SEQ ID NO: 27116 - protein, 15 aa, BK virus
AVGGEPLEMQGVLMN

SEQ ID NO: 27117 - protein, 15 aa, BK virus
VGGEPLEMQGVLMNY

SEQ ID NO: 27118 - protein, 15 aa, BK virus
GGEPLEMQGVLMNYR

SEQ ID NO: 27119 - protein, 15 aa, BK virus
GEPLEMQGVLMNYRS

SEQ ID NO: 27120 - protein, 15 aa, BK virus
EPLEMQGVLMNYRSK

SEQ ID NO: 27121 - protein, 15 aa, BK virus
PLEMQGVLMNYRSKY

SEQ ID NO: 27122 - protein, 15 aa, BK virus
LEMQGVLMNYRSKYP

SEQ ID NO: 27123 - protein, 15 aa, BK virus
EMQGVLMNYRSKYPD

SEQ ID NO: 27124 - protein, 15 aa, BK virus
MQGVLMNYRSKYPDG

SEQ ID NO: 27125 - protein, 15 aa, BK virus
QGVLMNYRSKYPDGT

SEQ ID NO: 27126 - protein, 15 aa, BK virus
GVLMNYRSKYPDGTI

SEQ ID NO: 27127 - protein, 15 aa, BK virus
VLMNYRSKYPDGTIT

SEQ ID NO: 27128 - protein, 15 aa, BK virus
LMNYRSKYPDGTITP

SEQ ID NO: 27129 - protein, 15 aa, BK virus
MNYRSKYPDGTITPK

SEQ ID NO: 27130 - protein, 15 aa, BK virus
NYRSKYPDGTITPKN

SEQ ID NO: 27131 - protein, 15 aa, BK virus
YRSKYPDGTITPKNP

SEQ ID NO: 27132 - protein, 15 aa, BK virus
RSKYPDGTITPKNPT

SEQ ID NO: 27133 - protein, 15 aa, BK virus
SKYPDGTITPKNPTA

SEQ ID NO: 27134 - protein, 15 aa, BK virus
KYPDGTITPKNPTAQ

SEQ ID NO: 27135 - protein, 15 aa, BK virus
YPDGTITPKNPTAQS

SEQ ID NO: 27136 - protein, 15 aa, BK virus
PDGTITPKNPTAQSQ

SEQ ID NO: 27137 - protein, 15 aa, BK virus
DGTITPKNPTAQSQV

SEQ ID NO: 27138 - protein, 15 aa, BK virus
GTITPKNPTAQSQVM

SEQ ID NO: 27139 - protein, 15 aa, BK virus
TITPKNPTAQSQVMN

SEQ ID NO: 27140 - protein, 15 aa, BK virus
ITPKNPTAQSQVMNT

SEQ ID NO: 27141 - protein, 15 aa, BK virus
TPKNPTAQSQVMNTD

SEQ ID NO: 27142 - protein, 15 aa, BK virus
PKNPTAQSQVMNTDH

SEQ ID NO: 27143 - protein, 15 aa, BK virus
KNPTAQSQVMNTDHK

SEQ ID NO: 27144 - protein, 15 aa, BK virus
NPTAQSQVMNTDHKA

SEQ ID NO: 27145 - protein, 15 aa, BK virus
PTAQSQVMNTDHKAY

SEQ ID NO: 27146 - protein, 15 aa, BK virus
TAQSQVMNTDHKAYL

SEQ ID NO: 27147 - protein, 15 aa, BK virus
AQSQVMNTDHKAYLD

SEQ ID NO: 27148 - protein, 15 aa, BK virus
QSQVMNTDHKAYLDK

SEQ ID NO: 27149 - protein, 15 aa, BK virus
SQVMNTDHKAYLDKN

SEQ ID NO: 27150 - protein, 15 aa, BK virus
QVMNTDHKAYLDKNN

SEQ ID NO: 27151 - protein, 15 aa, BK virus
VMNTDHKAYLDKNNA

SEQ ID NO: 27152 - protein, 15 aa, BK virus
MNTDHKAYLDKNNAY

SEQ ID NO: 27153 - protein, 15 aa, BK virus
NTDHKAYLDKNNAYP

SEQ ID NO: 27154 - protein, 15 aa, BK virus
TDHKAYLDKNNAYPV

SEQ ID NO: 27155 - protein, 15 aa, BK virus
DHKAYLDKNNAYPVE

SEQ ID NO: 27156 - protein, 15 aa, BK virus
HKAYLDKNNAYPVEC

SEQ ID NO: 27157 - protein, 15 aa, BK virus
KAYLDKNNAYPVECW

SEQ ID NO: 27158 - protein, 15 aa, BK virus
AYLDKNNAYPVECWV

SEQ ID NO: 27159 - protein, 15 aa, BK virus
YLDKNNAYPVECWVP

SEQ ID NO: 27160 - protein, 15 aa, BK virus
LDKNNAYPVECWVPD

SEQ ID NO: 27161 - protein, 15 aa, BK virus
DKNNAYPVECWVPDP

SEQ ID NO: 27162 - protein, 15 aa, BK virus
KNNAYPVECWVPDPS

SEQ ID NO: 27163 - protein, 15 aa, BK virus
NNAYPVECWVPDPSR

SEQ ID NO: 27164 - protein, 15 aa, BK virus
NAYPVECWVPDPSRN

SEQ ID NO: 27165 - protein, 15 aa, BK virus
AYPVECWVPDPSRNE

SEQ ID NO: 27166 - protein, 15 aa, BK virus
YPVECWVPDPSRNEN

SEQ ID NO: 27167 - protein, 15 aa, BK virus
PVECWVPDPSRNENA

SEQ ID NO: 27168 - protein, 15 aa, BK virus
VECWVPDPSRNENAR

SEQ ID NO: 27169 - protein, 15 aa, BK virus
ECWVPDPSRNENARY

SEQ ID NO: 27170 - protein, 15 aa, BK virus
CWVPDPSRNENARYF

SEQ ID NO: 27171 - protein, 15 aa, BK virus
WVPDPSRNENARYFG

SEQ ID NO: 27172 - protein, 15 aa, BK virus
VPDPSRNENARYFGT

SEQ ID NO: 27173 - protein, 15 aa, BK virus
PDPSRNENARYFGTF

SEQ ID NO: 27174 - protein, 15 aa, BK virus
DPSRNENARYFGTFT

SEQ ID NO: 27175 - protein, 15 aa, BK virus
PSRNENARYFGTFTG

SEQ ID NO: 27176 - protein, 15 aa, BK virus
SRNENARYFGTFTGG

SEQ ID NO: 27177 - protein, 15 aa, BK virus
RNENARYFGTFTGGE

SEQ ID NO: 27178 - protein, 15 aa, BK virus
NENARYFGTFTGGEN

SEQ ID NO: 27179 - protein, 15 aa, BK virus
ENARYFGTFTGGENV

SEQ ID NO: 27180 - protein, 15 aa, BK virus
NARYFGTFTGGENVP

SEQ ID NO: 27181 - protein, 15 aa, BK virus
ARYFGTFTGGENVPP

SEQ ID NO: 27182 - protein, 15 aa, BK virus
RYFGTFTGGENVPPV

SEQ ID NO: 27183 - protein, 15 aa, BK virus
YFGTFTGGENVPPVL

SEQ ID NO: 27184 - protein, 15 aa, BK virus
FGTFTGGENVPPVLH

SEQ ID NO: 27185 - protein, 15 aa, BK virus
GTFTGGENVPPVLHV

SEQ ID NO: 27186 - protein, 15 aa, BK virus
TFTGGENVPPVLHVT

SEQ ID NO: 27187 - protein, 15 aa, BK virus
FTGGENVPPVLHVTN

SEQ ID NO: 27188 - protein, 15 aa, BK virus
TGGENVPPVLHVTNT

SEQ ID NO: 27189 - protein, 15 aa, BK virus
GGENVPPVLHVTNTA

SEQ ID NO: 27190 - protein, 15 aa, BK virus
GENVPPVLHVTNTAT

SEQ ID NO: 27191 - protein, 15 aa, BK virus
ENVPPVLHVTNTATT

SEQ ID NO: 27192 - protein, 15 aa, BK virus
NVPPVLHVTNTATTV

SEQ ID NO: 27193 - protein, 15 aa, BK virus
VPPVLHVTNTATTVL

SEQ ID NO: 27194 - protein, 15 aa, BK virus
PPVLHVTNTATTVLL

SEQ ID NO: 27195 - protein, 15 aa, BK virus
PVLHVTNTATTVLLD

SEQ ID NO: 27196 - protein, 15 aa, BK virus
VLHVTNTATTVLLDE

SEQ ID NO: 27197 - protein, 15 aa, BK virus
LHVTNTATTVLLDEQ

SEQ ID NO: 27198 - protein, 15 aa, BK virus
HVTNTATTVLLDEQG

SEQ ID NO: 27199 - protein, 15 aa, BK virus
VTNTATTVLLDEQGV

SEQ ID NO: 27200 - protein, 15 aa, BK virus
TNTATTVLLDEQGVG

SEQ ID NO: 27201 - protein, 15 aa, BK virus
NTATTVLLDEQGVGP

SEQ ID NO: 27202 - protein, 15 aa, BK virus
TATTVLLDEQGVGPL

SEQ ID NO: 27203 - protein, 15 aa, BK virus
ATTVLLDEQGVGPLC

SEQ ID NO: 27204 - protein, 15 aa, BK virus
TTVLLDEQGVGPLCK

SEQ ID NO: 27205 - protein, 15 aa, BK virus
TVLLDEQGVGPLCKA

SEQ ID NO: 27206 - protein, 15 aa, BK virus
VLLDEQGVGPLCKAD

SEQ ID NO: 27207 - protein, 15 aa, BK virus
LLDEQGVGPLCKADS

SEQ ID NO: 27208 - protein, 15 aa, BK virus
LDEQGVGPLCKADSL

SEQ ID NO: 27209 - protein, 15 aa, BK virus
DEQGVGPLCKADSLY

SEQ ID NO: 27210 - protein, 15 aa, BK virus
EQGVGPLCKADSLYV

SEQ ID NO: 27211 - protein, 15 aa, BK virus
QGVGPLCKADSLYVS

SEQ ID NO: 27212 - protein, 15 aa, BK virus
GVGPLCKADSLYVSA

SEQ ID NO: 27213 - protein, 15 aa, BK virus
VGPLCKADSLYVSAA

SEQ ID NO: 27214 - protein, 15 aa, BK virus
GPLCKADSLYVSAAD

SEQ ID NO: 27215 - protein, 15 aa, BK virus
PLCKADSLYVSAADI

SEQ ID NO: 27216 - protein, 15 aa, BK virus
LCKADSLYVSAADIC

SEQ ID NO: 27217 - protein, 15 aa, BK virus
CKADSLYVSAADICG

SEQ ID NO: 27218 - protein, 15 aa, BK virus
KADSLYVSAADICGL

SEQ ID NO: 27219 - protein, 15 aa, BK virus
ADSLYVSAADICGLF

SEQ ID NO: 27220 - protein, 15 aa, BK virus
DSLYVSAADICGLFT

SEQ ID NO: 27221 - protein, 15 aa, BK virus
SLYVSAADICGLFTN

SEQ ID NO: 27222 - protein, 15 aa, BK virus
LYVSAADICGLFTNS

SEQ ID NO: 27223 - protein, 15 aa, BK virus
YVSAADICGLFTNSS

SEQ ID NO: 27224 - protein, 15 aa, BK virus
VSAADICGLFTNSSG

SEQ ID NO: 27225 - protein, 15 aa, BK virus
SAADICGLFTNSSGT

SEQ ID NO: 27226 - protein, 15 aa, BK virus
AADICGLFTNSSGTQ

SEQ ID NO: 27227 - protein, 15 aa, BK virus
ADICGLFTNSSGTQQ

SEQ ID NO: 27228 - protein, 15 aa, BK virus
DICGLFTNSSGTQQW

SEQ ID NO: 27229 - protein, 15 aa, BK virus
ICGLFTNSSGTQQWR

SEQ ID NO: 27230 - protein, 15 aa, BK virus
CGLFTNSSGTQQWRG

SEQ ID NO: 27231 - protein, 15 aa, BK virus
GLFTNSSGTQQWRGL

SEQ ID NO: 27232 - protein, 15 aa, BK virus
LFTNSSGTQQWRGLA

SEQ ID NO: 27233 - protein, 15 aa, BK virus
FTNSSGTQQWRGLAR

SEQ ID NO: 27234 - protein, 15 aa, BK virus
TNSSGTQQWRGLARY

SEQ ID NO: 27235 - protein, 15 aa, BK virus
NSSGTQQWRGLARYF

SEQ ID NO: 27236 - protein, 15 aa, BK virus
SSGTQQWRGLARYFK

SEQ ID NO: 27237 - protein, 15 aa, BK virus
SGTQQWRGLARYFKI

SEQ ID NO: 27238 - protein, 15 aa, BK virus
GTQQWRGLARYFKIR

SEQ ID NO: 27239 - protein, 15 aa, BK virus
TQQWRGLARYFKIRL

SEQ ID NO: 27240 - protein, 15 aa, BK virus
QQWRGLARYFKIRLR

SEQ ID NO: 27241 - protein, 15 aa, BK virus
QWRGLARYFKIRLRK

SEQ ID NO: 27242 - protein, 15 aa, BK virus
WRGLARYFKIRLRKR

SEQ ID NO: 27243 - protein, 15 aa, BK virus
RGLARYFKIRLRKRS

SEQ ID NO: 27244 - protein, 15 aa, BK virus
GLARYFKIRLRKRSV

SEQ ID NO: 27245 - protein, 15 aa, BK virus
LARYFKIRLRKRSVK

SEQ ID NO: 27246 - protein, 15 aa, BK virus
ARYFKIRLRKRSVKN

SEQ ID NO: 27247 - protein, 15 aa, BK virus
RYFKIRLRKRSVKNP

SEQ ID NO: 27248 - protein, 15 aa, BK virus
YFKIRLRKRSVKNPY

SEQ ID NO: 27249 - protein, 15 aa, BK virus
FKIRLRKRSVKNPYP

SEQ ID NO: 27250 - protein, 15 aa, BK virus
KIRLRKRSVKNPYPI

SEQ ID NO: 27251 - protein, 15 aa, BK virus
IRLRKRSVKNPYPIS

SEQ ID NO: 27252 - protein, 15 aa, BK virus
RLRKRSVKNPYPISF

SEQ ID NO: 27253 - protein, 15 aa, BK virus
LRKRSVKNPYPISFL

SEQ ID NO: 27254 - protein, 15 aa, BK virus
RKRSVKNPYPISFLL

SEQ ID NO: 27255 - protein, 15 aa, BK virus
KRSVKNPYPISFLLS

SEQ ID NO: 27256 - protein, 15 aa, BK virus
RSVKNPYPISFLLSD

SEQ ID NO: 27257 - protein, 15 aa, BK virus
SVKNPYPISFLLSDL

SEQ ID NO: 27258 - protein, 15 aa, BK virus
VKNPYPISFLLSDLI

SEQ ID NO: 27259 - protein, 15 aa, BK virus
KNPYPISFLLSDLIN

SEQ ID NO: 27260 - protein, 15 aa, BK virus
NPYPISFLLSDLINR

SEQ ID NO: 27261 - protein, 15 aa, BK virus
PYPISFLLSDLINRR

SEQ ID NO: 27262 - protein, 15 aa, BK virus
YPISFLLSDLINRRT

SEQ ID NO: 27263 - protein, 15 aa, BK virus
PISFLLSDLINRRTQ

SEQ ID NO: 27264 - protein, 15 aa, BK virus
ISFLLSDLINRRTQR

SEQ ID NO: 27265 - protein, 15 aa, BK virus
SFLLSDLINRRTQRV

SEQ ID NO: 27266 - protein, 15 aa, BK virus
FLLSDLINRRTQRVD

SEQ ID NO: 27267 - protein, 15 aa, BK virus
LLSDLINRRTQRVDG

SEQ ID NO: 27268 - protein, 15 aa, BK virus
LSDLINRRTQRVDGQ

SEQ ID NO: 27269 - protein, 15 aa, BK virus
SDLINRRTQRVDGQP

SEQ ID NO: 27270 - protein, 15 aa, BK virus
DLINRRTQRVDGQPM

SEQ ID NO: 27271 - protein, 15 aa, BK virus
LINRRTQRVDGQPMY

SEQ ID NO: 27272 - protein, 15 aa, BK virus
INRRTQRVDGQPMYG

SEQ ID NO: 27273 - protein, 15 aa, BK virus
NRRTQRVDGQPMYGM

SEQ ID NO: 27274 - protein, 15 aa, BK virus
RRTQRVDGQPMYGME

SEQ ID NO: 27275 - protein, 15 aa, BK virus
RTQRVDGQPMYGMES

SEQ ID NO: 27276 - protein, 15 aa, BK virus
TQRVDGQPMYGMESQ

SEQ ID NO: 27277 - protein, 15 aa, BK virus
QRVDGQPMYGMESQV

SEQ ID NO: 27278 - protein, 15 aa, BK virus
RVDGQPMYGMESQVE

SEQ ID NO: 27279 - protein, 15 aa, BK virus
VDGQPMYGMESQVEE

SEQ ID NO: 27280 - protein, 15 aa, BK virus
DGQPMYGMESQVEEV

SEQ ID NO: 27281 - protein, 15 aa, BK virus
GQPMYGMESQVEEVR

SEQ ID NO: 27282 - protein, 15 aa, BK virus
QPMYGMESQVEEVRV

SEQ ID NO: 27283 - protein, 15 aa, BK virus
PMYGMESQVEEVRVF

SEQ ID NO: 27284 - protein, 15 aa, BK virus
MYGMESQVEEVRVFD

SEQ ID NO: 27285 - protein, 15 aa, BK virus
YGMESQVEEVRVFDG

SEQ ID NO: 27286 - protein, 15 aa, BK virus
GMESQVEEVRVFDGT

SEQ ID NO: 27287 - protein, 15 aa, BK virus
MESQVEEVRVFDGTE

SEQ ID NO: 27288 - protein, 15 aa, BK virus
ESQVEEVRVFDGTER

SEQ ID NO: 27289 - protein, 15 aa, BK virus
SQVEEVRVFDGTERL

SEQ ID NO: 27290 - protein, 15 aa, BK virus
QVEEVRVFDGTERLP

SEQ ID NO: 27291 - protein, 15 aa, BK virus
VEEVRVFDGTERLPG

SEQ ID NO: 27292 - protein, 15 aa, BK virus
EEVRVFDGTERLPGD

SEQ ID NO: 27293 - protein, 15 aa, BK virus
EVRVFDGTERLPGDP

SEQ ID NO: 27294 - protein, 15 aa, BK virus
VRVFDGTERLPGDPD

SEQ ID NO: 27295 - protein, 15 aa, BK virus
RVFDGTERLPGDPDM

SEQ ID NO: 27296 - protein, 15 aa, BK virus
VFDGTERLPGDPDMI

SEQ ID NO: 27297 - protein, 15 aa, BK virus
FDGTERLPGDPDMIR

SEQ ID NO: 27298 - protein, 15 aa, BK virus
DGTERLPGDPDMIRY

SEQ ID NO: 27299 - protein, 15 aa, BK virus
GTERLPGDPDMIRYI

SEQ ID NO: 27300 - protein, 15 aa, BK virus
TERLPGDPDMIRYID

SEQ ID NO: 27301 - protein, 15 aa, BK virus
ERLPGDPDMIRYIDK

SEQ ID NO: 27302 - protein, 15 aa, BK virus
RLPGDPDMIRYIDKQ

SEQ ID NO: 27303 - protein, 15 aa, BK virus
LPGDPDMIRYIDKQG

SEQ ID NO: 27304 - protein, 15 aa, BK virus
PGDPDMIRYIDKQGQ

SEQ ID NO: 27305 - protein, 15 aa, BK virus
GDPDMIRYIDKQGQL

SEQ ID NO: 27306 - protein, 15 aa, BK virus
DPDMIRYIDKQGQLQ

SEQ ID NO: 27307 - protein, 15 aa, BK virus
PDMIRYIDKQGQLQT

SEQ ID NO: 27308 - protein, 15 aa, BK virus
DMIRYIDKQGQLQTK

SEQ ID NO: 27309 - protein, 15 aa, BK virus
MIRYIDKQGQLQTKM

SEQ ID NO: 27310 - protein, 15 aa, BK virus
IRYIDKQGQLQTKML

SEQ ID NO: 27311 - protein, 15 aa, BK virus
TGAFIVHIHLINAAF

SEQ ID NO: 27312 - protein, 15 aa, BK virus
GAFIVHIHLINAAFV

SEQ ID NO: 27313 - protein, 15 aa, BK virus
ATFKLVLFWGWCFRP

SEQ ID NO: 27314 - protein, 15 aa, BK virus
TFKLVLFWGWCFRPF

SEQ ID NO: 27315 - protein, 15 aa, BK virus
FKLVLFWGWCFRPFK

SEQ ID NO: 27316 - protein, 15 aa, BK virus
KLVLFWGWCFRPFKT

SEQ ID NO: 27317 - protein, 15 aa, BK virus
LVLFWGWCFRPFKTL

SEQ ID NO: 27318 - protein, 15 aa, BK virus
VLFWGWCFRPFKTLK

SEQ ID NO: 27319 - protein, 15 aa, BK virus
LFWGWCFRPFKTLKA

SEQ ID NO: 27320 - protein, 15 aa, BK virus
FWGWCFRPFKTLKAF

SEQ ID NO: 27321 - protein, 15 aa, BK virus
WGWCFRPFKTLKAFT

SEQ ID NO: 27322 - protein, 15 aa, BK virus
GWCFRPFKTLKAFTQ

SEQ ID NO: 27323 - protein, 15 aa, BK virus
WCFRPFKTLKAFTQM

SEQ ID NO: 27324 - protein, 15 aa, BK virus
CFRPFKTLKAFTQMQ

SEQ ID NO: 27325 - protein, 15 aa, BK virus
FRPFKTLKAFTQMQL

SEQ ID NO: 27326 - protein, 15 aa, BK virus
RPFKTLKAFTQMQLL

SEQ ID NO: 27327 - protein, 15 aa, BK virus
PFKTLKAFTQMQLLT

SEQ ID NO: 27328 - protein, 15 aa, BK virus
FKTLKAFTQMQLLTM

SEQ ID NO: 27329 - protein, 15 aa, BK virus
KTLKAFTQMQLLTMG

SEQ ID NO: 27330 - protein, 15 aa, BK virus
TLKAFTQMQLLTMGV

SEQ ID NO: 27331 - protein, 15 aa, BK virus
ILFSCNIKNTFPHAY

SEQ ID NO: 27332 - protein, 15 aa, BK virus
LFSCNIKNTFPHAYI

SEQ ID NO: 27333 - protein, 15 aa, BK virus
FSCNIKNTFPHAYII

SEQ ID NO: 27334 - protein, 15 aa, BK virus
SCNIKNTFPHAYIIF

SEQ ID NO: 27335 - protein, 15 aa, BK virus
CNIKNTFPHAYIIFH

SEQ ID NO: 27336 - protein, 15 aa, BK virus
NIKNTFPHAYIIFHP

SEQ ID NO: 27337 - protein, 15 aa, BK virus
KSIHTYLRIQPFLPF

SEQ ID NO: 27338 - protein, 15 aa, BK virus
SIHTYLRIQPFLPFN

SEQ ID NO: 27339 - protein, 15 aa, BK virus
IHTYLRIQPFLPFNN

SEQ ID NO: 27340 - protein, 15 aa, BK virus
HTYLRIQPFLPFNNS

SEQ ID NO: 27341 - protein, 15 aa, BK virus
TYLRIQPFLPFNNSR

SEQ ID NO: 27342 - protein, 15 aa, BK virus
YLRIQPFLPFNNSRL

SEQ ID NO: 27343 - protein, 15 aa, BK virus
LRIQPFLPFNNSRLY

SEQ ID NO: 27344 - protein, 15 aa, BK virus
RIQPFLPFNNSRLYI

SEQ ID NO: 27345 - protein, 15 aa, BK virus
IQPFLPFNNSRLYIS

SEQ ID NO: 27346 - protein, 15 aa, BK virus
QPFLPFNNSRLYISC

SEQ ID NO: 27347 - protein, 15 aa, BK virus
PFLPFNNSRLYISCK

SEQ ID NO: 27348 - protein, 15 aa, BK virus
FLPFNNSRLYISCKI

SEQ ID NO: 27349 - protein, 15 aa, BK virus
LPFNNSRLYISCKIS

SEQ ID NO: 27350 - protein, 15 aa, BK virus
PFNNSRLYISCKISY

SEQ ID NO: 27351 - protein, 15 aa, BK virus
FNNSRLYISCKISYR

SEQ ID NO: 27352 - protein, 15 aa, BK virus
NNSRLYISCKISYRP

SEQ ID NO: 27353 - protein, 15 aa, BK virus
NSRLYISCKISYRPK

SEQ ID NO: 27354 - protein, 15 aa, BK virus
SRLYISCKISYRPKP

SEQ ID NO: 27355 - protein, 15 aa, BK virus
RLYISCKISYRPKPN

SEQ ID NO: 27356 - protein, 15 aa, BK virus
IYFGPKIYLSYKSSL

SEQ ID NO: 27357 - protein, 15 aa, BK virus
YFGPKIYLSYKSSLQ

SEQ ID NO: 27358 - protein, 15 aa, BK virus
FGPKIYLSYKSSLQG

SEQ ID NO: 27359 - protein, 15 aa, BK virus
GPKIYLSYKSSLQGF

SEQ ID NO: 27360 - protein, 15 aa, BK virus
PKIYLSYKSSLQGFR

SEQ ID NO: 27361 - protein, 15 aa, BK virus
KIYLSYKSSLQGFRD

SEQ ID NO: 27362 - protein, 15 aa, BK virus
IYLSYKSSLQGFRDR

SEQ ID NO: 27363 - protein, 15 aa, BK virus
YLSYKSSLQGFRDRI

SEQ ID NO: 27364 - protein, 15 aa, BK virus
LSYKSSLQGFRDRIL

SEQ ID NO: 27365 - protein, 15 aa, BK virus
SYKSSLQGFRDRILI

SEQ ID NO: 27366 - protein, 15 aa, BK virus
YKSSLQGFRDRILIH

SEQ ID NO: 27367 - protein, 15 aa, BK virus
KSSLQGFRDRILIHC

SEQ ID NO: 27368 - protein, 15 aa, BK virus
SSLQGFRDRILIHCN

SEQ ID NO: 27369 - protein, 15 aa, BK virus
SLQGFRDRILIHCNQ

SEQ ID NO: 27370 - protein, 15 aa, BK virus
LQGFRDRILIHCNQA

SEQ ID NO: 27371 - protein, 15 aa, BK virus
QGFRDRILIHCNQAW

SEQ ID NO: 27372 - protein, 15 aa, BK virus
GFRDRILIHCNQAWW

SEQ ID NO: 27373 - protein, 15 aa, BK virus
FRDRILIHCNQAWWK

SEQ ID NO: 27374 - protein, 15 aa, BK virus
RDRILIHCNQAWWKY

SEQ ID NO: 27375 - protein, 15 aa, BK virus
DRILIHCNQAWWKYL

SEQ ID NO: 27376 - protein, 15 aa, BK virus
RILIHCNQAWWKYLG

SEQ ID NO: 27377 - protein, 15 aa, BK virus
ILIHCNQAWWKYLGS

SEQ ID NO: 27378 - protein, 15 aa, BK virus
LIHCNQAWWKYLGSF

SEQ ID NO: 27379 - protein, 15 aa, BK virus
IHCNQAWWKYLGSFV

SEQ ID NO: 27380 - protein, 15 aa, BK virus
FSSCPFYIFKNNHVL

SEQ ID NO: 27381 - protein, 15 aa, BK virus
SSCPFYIFKNNHVLI

SEQ ID NO: 27382 - protein, 15 aa, BK virus
SCPFYIFKNNHVLIY

SEQ ID NO: 27383 - protein, 15 aa, BK virus
CPFYIFKNNHVLIYS

SEQ ID NO: 27384 - protein, 15 aa, BK virus
PFYIFKNNHVLIYSY

SEQ ID NO: 27385 - protein, 15 aa, BK virus
FYIFKNNHVLIYSYT

SEQ ID NO: 27386 - protein, 15 aa, BK virus
PVSSFRYIENNTVQK

SEQ ID NO: 27387 - protein, 15 aa, BK virus
VSSFRYIENNTVQKI

SEQ ID NO: 27388 - protein, 15 aa, BK virus
SSFRYIENNTVQKIK

SEQ ID NO: 27389 - protein, 15 aa, BK virus
SFRYIENNTVQKIKY

SEQ ID NO: 27390 - protein, 15 aa, BK virus
FRYIENNTVQKIKYY

SEQ ID NO: 27391 - protein, 15 aa, BK virus
RYIENNTVQKIKYYR

SEQ ID NO: 27392 - protein, 15 aa, BK virus
YIENNTVQKIKYYRI

SEQ ID NO: 27393 - protein, 15 aa, BK virus
IENNTVQKIKYYRIH

SEQ ID NO: 27394 - protein, 15 aa, BK virus
ENNTVQKIKYYRIHF

SEQ ID NO: 27395 - protein, 15 aa, BK virus
NNTVQKIKYYRIHFR

SEQ ID NO: 27396 - protein, 15 aa, BK virus
HFFPGHMKGIYSFFS

SEQ ID NO: 27397 - protein, 15 aa, BK virus
NCIYCLLTNTFLIFT

SEQ ID NO: 27398 - protein, 15 aa, BK virus
CIYCLLTNTFLIFTF

SEQ ID NO: 27399 - protein, 15 aa, BK virus
IYCLLTNTFLIFTFC

SEQ ID NO: 27400 - protein, 15 aa, BK virus
YCLLTNTFLIFTFCK

SEQ ID NO: 27401 - protein, 15 aa, BK virus
CLLTNTFLIFTFCKN

SEQ ID NO: 27402 - protein, 15 aa, BK virus
LLTNTFLIFTFCKNN

SEQ ID NO: 27403 - protein, 15 aa, BK virus
LTNTFLIFTFCKNNS

SEQ ID NO: 27404 - protein, 15 aa, BK virus
TNTFLIFTFCKNNSI

SEQ ID NO: 27405 - protein, 15 aa, BK virus
NTFLIFTFCKNNSIC

SEQ ID NO: 27406 - protein, 15 aa, BK virus
TFLIFTFCKNNSICK

SEQ ID NO: 27407 - protein, 15 aa, BK virus
FLIFTFCKNNSICKV

SEQ ID NO: 27408 - protein, 15 aa, BK virus
LIFTFCKNNSICKVL

SEQ ID NO: 27409 - protein, 15 aa, BK virus
IFTFCKNNSICKVLF

SEQ ID NO: 27410 - protein, 15 aa, BK virus
FTFCKNNSICKVLFM

SEQ ID NO: 27411 - protein, 15 aa, BK virus
TFCKNNSICKVLFMI

SEQ ID NO: 27412 - protein, 15 aa, BK virus
FCKNNSICKVLFMIL

SEQ ID NO: 27413 - protein, 15 aa, BK virus
CKNNSICKVLFMILK

SEQ ID NO: 27414 - protein, 15 aa, BK virus
KNNSICKVLFMILKV

SEQ ID NO: 27415 - protein, 15 aa, BK virus
NNSICKVLFMILKVI

SEQ ID NO: 27416 - protein, 15 aa, BK virus
NSICKVLFMILKVIR

SEQ ID NO: 27417 - protein, 15 aa, BK virus
SICKVLFMILKVIRL

SEQ ID NO: 27418 - protein, 15 aa, BK virus
ICKVLFMILKVIRLV

SEQ ID NO: 27419 - protein, 15 aa, BK virus
CKVLFMILKVIRLVF

SEQ ID NO: 27420 - protein, 15 aa, BK virus
KVLFMILKVIRLVFF

SEQ ID NO: 27421 - protein, 15 aa, BK virus
VLFMILKVIRLVFFL

SEQ ID NO: 27422 - protein, 15 aa, BK virus
LFMILKVIRLVFFLT

SEQ ID NO: 27423 - protein, 15 aa, BK virus
FMILKVIRLVFFLTL

SEQ ID NO: 27424 - protein, 15 aa, BK virus
MILKVIRLVFFLTLF

SEQ ID NO: 27425 - protein, 15 aa, BK virus
ILKVIRLVFFLTLFT

SEQ ID NO: 27426 - protein, 15 aa, BK virus
LKVIRLVFFLTLFTL

SEQ ID NO: 27427 - protein, 15 aa, BK virus
KVIRLVFFLTLFTLL

SEQ ID NO: 27428 - protein, 15 aa, BK virus
VIRLVFFLTLFTLLY

SEQ ID NO: 27429 - protein, 15 aa, BK virus
IRLVFFLTLFTLLYI

SEQ ID NO: 27430 - protein, 15 aa, BK virus
RLVFFLTLFTLLYIV

SEQ ID NO: 27431 - protein, 15 aa, BK virus
LVFFLTLFTLLYIVL

SEQ ID NO: 27432 - protein, 15 aa, BK virus
VFFLTLFTLLYIVLK

SEQ ID NO: 27433 - protein, 15 aa, BK virus
FFLTLFTLLYIVLKF

SEQ ID NO: 27434 - protein, 15 aa, BK virus
FPRHLLCFFRLFWAK

SEQ ID NO: 27435 - protein, 15 aa, BK virus
PRHLLCFFRLFWAKI

SEQ ID NO: 27436 - protein, 15 aa, BK virus
RHLLCFFRLFWAKIM

SEQ ID NO: 27437 - protein, 15 aa, BK virus
HLLCFFRLFWAKIML

SEQ ID NO: 27438 - protein, 15 aa, BK virus
LLCFFRLFWAKIMLL

SEQ ID NO: 27439 - protein, 15 aa, BK virus
APLNAFFYSMVWISS

SEQ ID NO: 27440 - protein, 15 aa, BK virus
KTKGTQLLTEIINCR

SEQ ID NO: 27441 - protein, 15 aa, BK virus
TKGTQLLTEIINCRN

SEQ ID NO: 27442 - protein, 15 aa, BK virus
KGTQLLTEIINCRNS

SEQ ID NO: 27443 - protein, 15 aa, BK virus
GTQLLTEIINCRNSM

SEQ ID NO: 27444 - protein, 15 aa, BK virus
TQLLTEIINCRNSMS

SEQ ID NO: 27445 - protein, 15 aa, BK virus
QLLTEIINCRNSMSM

SEQ ID NO: 27446 - protein, 15 aa, BK virus
LLTEIINCRNSMSMW

SEQ ID NO: 27447 - protein, 15 aa, BK virus
LTEIINCRNSMSMWS

SEQ ID NO: 27448 - protein, 15 aa, BK virus
KEYNIMPSTHVSTNK

SEQ ID NO: 27449 - protein, 15 aa, BK virus
EYNIMPSTHVSTNKS

SEQ ID NO: 27450 - protein, 15 aa, BK virus
YNIMPSTHVSTNKSY

SEQ ID NO: 27451 - protein, 15 aa, BK virus
NIMPSTHVSTNKSYR

SEQ ID NO: 27452 - protein, 15 aa, BK virus
IMPSTHVSTNKSYRI

SEQ ID NO: 27453 - protein, 15 aa, BK virus
MPSTHVSTNKSYRIF

SEQ ID NO: 27454 - protein, 15 aa, BK virus
PSTHVSTNKSYRIFF

SEQ ID NO: 27455 - protein, 15 aa, BK virus
STHVSTNKSYRIFFH

SEQ ID NO: 27456 - protein, 15 aa, BK virus
THVSTNKSYRIFFHK

SEQ ID NO: 27457 - protein, 15 aa, BK virus
HVSTNKSYRIFFHKF

SEQ ID NO: 27458 - protein, 15 aa, BK virus
VSTNKSYRIFFHKFF

SEQ ID NO: 27459 - protein, 15 aa, BK virus
STNKSYRIFFHKFFI

SEQ ID NO: 27460 - protein, 15 aa, BK virus
TNKSYRIFFHKFFIQ

SEQ ID NO: 27461 - protein, 15 aa, BK virus
NKSYRIFFHKFFIQN

SEQ ID NO: 27462 - protein, 15 aa, BK virus
KSYRIFFHKFFIQNL

SEQ ID NO: 27463 - protein, 15 aa, BK virus
SYRIFFHKFFIQNLS

SEQ ID NO: 27464 - protein, 15 aa, BK virus
YRIFFHKFFIQNLSF

SEQ ID NO: 27465 - protein, 15 aa, BK virus
RIFFHKFFIQNLSFF

SEQ ID NO: 27466 - protein, 15 aa, BK virus
IFFHKFFIQNLSFFF

SEQ ID NO: 27467 - protein, 15 aa, BK virus
FFHKFFIQNLSFFFS

SEQ ID NO: 27468 - protein, 15 aa, BK virus
FHKFFIQNLSFFFSS

SEQ ID NO: 27469 - protein, 15 aa, BK virus
HKFFIQNLSFFFSSI

SEQ ID NO: 27470 - protein, 15 aa, BK virus
KFFIQNLSFFFSSIH

SEQ ID NO: 27471 - protein, 15 aa, BK virus
FFIQNLSFFFSSIHS

SEQ ID NO: 27472 - protein, 15 aa, BK virus
FIQNLSFFFSSIHSK

SEQ ID NO: 27473 - protein, 15 aa, BK virus
IQNLSFFFSSIHSKA

SEQ ID NO: 27474 - protein, 15 aa, BK virus
QNLSFFFSSIHSKAG

SEQ ID NO: 27475 - protein, 15 aa, BK virus
NLSFFFSSIHSKAGK

SEQ ID NO: 27476 - protein, 15 aa, BK virus
LSFFFSSIHSKAGKG

SEQ ID NO: 27477 - protein, 15 aa, BK virus
SFFFSSIHSKAGKGS

SEQ ID NO: 27478 - protein, 15 aa, BK virus
FFFSSIHSKAGKGSI

SEQ ID NO: 27479 - protein, 15 aa, BK virus
FFSSIHSKAGKGSIT

SEQ ID NO: 27480 - protein, 15 aa, BK virus
FSSIHSKAGKGSITK

SEQ ID NO: 27481 - protein, 15 aa, BK virus
SSIHSKAGKGSITKY

SEQ ID NO: 27482 - protein, 15 aa, BK virus
SIHSKAGKGSITKYS

SEQ ID NO: 27483 - protein, 15 aa, BK virus
IHSKAGKGSITKYSL

SEQ ID NO: 27484 - protein, 15 aa, BK virus
HSKAGKGSITKYSLT

SEQ ID NO: 27485 - protein, 15 aa, BK virus
SKAGKGSITKYSLTK

SEQ ID NO: 27486 - protein, 15 aa, BK virus
KAGKGSITKYSLTKK

SEQ ID NO: 27487 - protein, 15 aa, BK virus
AGKGSITKYSLTKKL

SEQ ID NO: 27488 - protein, 15 aa, BK virus
GKGSITKYSLTKKLV

SEQ ID NO: 27489 - protein, 15 aa, BK virus
IRGKVFRVFYLSFFF

SEQ ID NO: 27490 - protein, 15 aa, BK virus
RGKVFRVFYLSFFFG

SEQ ID NO: 27491 - protein, 15 aa, BK virus
GKVFRVFYLSFFFGW

SEQ ID NO: 27492 - protein, 15 aa, BK virus
KVFRVFYLSFFFGWC

SEQ ID NO: 27493 - protein, 15 aa, BK virus
VLRICCCFFITGKHI

SEQ ID NO: 27494 - protein, 15 aa, BK virus
LRICCCFFITGKHIF

SEQ ID NO: 27495 - protein, 15 aa, BK virus
RICCCFFITGKHIFM

SEQ ID NO: 27496 - protein, 15 aa, BK virus
ICCCFFITGKHIFMA

SEQ ID NO: 27497 - protein, 15 aa, BK virus
CCCFFITGKHIFMAK

SEQ ID NO: 27498 - protein, 15 aa, BK virus
IFIPFFIKGTPPGLP

SEQ ID NO: 27499 - protein, 15 aa, BK virus
FIPFFIKGTPPGLPL

SEQ ID NO: 27500 - protein, 15 aa, BK virus
IPFFIKGTPPGLPLF

SEQ ID NO: 27501 - protein, 15 aa, BK virus
PFFIKGTPPGLPLFC

SEQ ID NO: 27502 - protein, 15 aa, BK virus
FFIKGTPPGLPLFCS

SEQ ID NO: 27503 - protein, 15 aa, BK virus
FIKGTPPGLPLFCSI

SEQ ID NO: 27504 - protein, 15 aa, BK virus
IKGTPPGLPLFCSIG

SEQ ID NO: 27505 - protein, 15 aa, BK virus
KGTPPGLPLFCSIGW

SEQ ID NO: 27506 - protein, 15 aa, BK virus
GTPPGLPLFCSIGWH

SEQ ID NO: 27507 - protein, 15 aa, BK virus
TPPGLPLFCSIGWHL

SEQ ID NO: 27508 - protein, 15 aa, BK virus
SFRSLKGVSPIIWTH

SEQ ID NO: 27509 - protein, 15 aa, BK virus
FRSLKGVSPIIWTHH

SEQ ID NO: 27510 - protein, 15 aa, BK virus
RSLKGVSPIIWTHHC

SEQ ID NO: 27511 - protein, 15 aa, BK virus
SLKGVSPIIWTHHCR

SEQ ID NO: 27512 - protein, 15 aa, BK virus
LKGVSPIIWTHHCRV

SEQ ID NO: 27513 - protein, 15 aa, BK virus
KGVSPIIWTHHCRVS

SEQ ID NO: 27514 - protein, 15 aa, BK virus
GVSPIIWTHHCRVSS

SEQ ID NO: 27515 - protein, 15 aa, BK virus
VSPIIWTHHCRVSSV

SEQ ID NO: 27516 - protein, 15 aa, BK virus
SPIIWTHHCRVSSVR

SEQ ID NO: 27517 - protein, 15 aa, BK virus
PIIWTHHCRVSSVRS

SEQ ID NO: 27518 - protein, 15 aa, BK virus
IIWTHHCRVSSVRSK

SEQ ID NO: 27519 - protein, 15 aa, BK virus
IWTHHCRVSSVRSKP

SEQ ID NO: 27520 - protein, 15 aa, BK virus
WTHHCRVSSVRSKPN

SEQ ID NO: 27521 - protein, 15 aa, BK virus
THHCRVSSVRSKPNH

SEQ ID NO: 27522 - protein, 15 aa, BK virus
HHCRVSSVRSKPNHC

SEQ ID NO: 27523 - protein, 15 aa, BK virus
HCRVSSVRSKPNHCV

SEQ ID NO: 27524 - protein, 15 aa, BK virus
CRVSSVRSKPNHCVK

SEQ ID NO: 27525 - protein, 15 aa, BK virus
RVSSVRSKPNHCVKQ

SEQ ID NO: 27526 - protein, 15 aa, BK virus
VSSVRSKPNHCVKQS

SEQ ID NO: 27527 - protein, 15 aa, BK virus
SSVRSKPNHCVKQSM

SEQ ID NO: 27528 - protein, 15 aa, BK virus
SVRSKPNHCVKQSMQ

SEQ ID NO: 27529 - protein, 15 aa, BK virus
QSIQTKGSFLKNFLF

SEQ ID NO: 27530 - protein, 15 aa, BK virus
SIQTKGSFLKNFLFK

SEQ ID NO: 27531 - protein, 15 aa, BK virus
IQTKGSFLKNFLFKC

SEQ ID NO: 27532 - protein, 15 aa, BK virus
QTKGSFLKNFLFKCL

SEQ ID NO: 27533 - protein, 15 aa, BK virus
TKGSFLKNFLFKCLN

SEQ ID NO: 27534 - protein, 15 aa, BK virus
KGSFLKNFLFKCLNL

SEQ ID NO: 27535 - protein, 15 aa, BK virus
GSFLKNFLFKCLNLS

SEQ ID NO: 27536 - protein, 15 aa, BK virus
HSMQGQCTEGFLEQI

SEQ ID NO: 27537 - protein, 15 aa, BK virus
SMQGQCTEGFLEQIG

SEQ ID NO: 27538 - protein, 15 aa, BK virus
MQGQCTEGFLEQIGH

SEQ ID NO: 27539 - protein, 15 aa, BK virus
QGQCTEGFLEQIGHS

SEQ ID NO: 27540 - protein, 15 aa, BK virus
GQCTEGFLEQIGHSL

SEQ ID NO: 27541 - protein, 15 aa, BK virus
QCTEGFLEQIGHSLQ

SEQ ID NO: 27542 - protein, 15 aa, BK virus
CTEGFLEQIGHSLQY

SEQ ID NO: 27543 - protein, 15 aa, BK virus
TEGFLEQIGHSLQYR

SEQ ID NO: 27544 - protein, 15 aa, BK virus
EGFLEQIGHSLQYRV

SEQ ID NO: 27545 - protein, 15 aa, BK virus
GFLEQIGHSLQYRVS

SEQ ID NO: 27546 - protein, 15 aa, BK virus
FLEQIGHSLQYRVSG

SEQ ID NO: 27547 - protein, 15 aa, BK virus
LEQIGHSLQYRVSGQ

SEQ ID NO: 27548 - protein, 15 aa, BK virus
EQIGHSLQYRVSGQR

SEQ ID NO: 27549 - protein, 15 aa, BK virus
QIGHSLQYRVSGQRG

SEQ ID NO: 27550 - protein, 15 aa, BK virus
IGHSLQYRVSGQRGK

SEQ ID NO: 27551 - protein, 15 aa, BK virus
GHSLQYRVSGQRGKS

SEQ ID NO: 27552 - protein, 15 aa, BK virus
HSLQYRVSGQRGKSA

SEQ ID NO: 27553 - protein, 15 aa, BK virus
SLQYRVSGQRGKSAQ

SEQ ID NO: 27554 - protein, 15 aa, BK virus
LQYRVSGQRGKSAQT

SEQ ID NO: 27555 - protein, 15 aa, BK virus
QYRVSGQRGKSAQTS

SEQ ID NO: 27556 - protein, 15 aa, BK virus
YRVSGQRGKSAQTSE

SEQ ID NO: 27557 - protein, 15 aa, BK virus
RVSGQRGKSAQTSEL

SEQ ID NO: 27558 - protein, 15 aa, BK virus
VSGQRGKSAQTSELL

SEQ ID NO: 27559 - protein, 15 aa, BK virus
SGQRGKSAQTSELLQ

SEQ ID NO: 27560 - protein, 15 aa, BK virus
GQRGKSAQTSELLQV

SEQ ID NO: 27561 - protein, 15 aa, BK virus
QRGKSAQTSELLQVP

SEQ ID NO: 27562 - protein, 15 aa, BK virus
RGKSAQTSELLQVPK

SEQ ID NO: 27563 - protein, 15 aa, BK virus
GKSAQTSELLQVPKS

SEQ ID NO: 27564 - protein, 15 aa, BK virus
KSAQTSELLQVPKSG

SEQ ID NO: 27565 - protein, 15 aa, BK virus
ATFTSCSIFLYKVFI

SEQ ID NO: 27566 - protein, 15 aa, BK virus
TFTSCSIFLYKVFIL

SEQ ID NO: 27567 - protein, 15 aa, BK virus
FTSCSIFLYKVFILF

SEQ ID NO: 27568 - protein, 15 aa, BK virus
TSCSIFLYKVFILFI

SEQ ID NO: 27569 - protein, 15 aa, BK virus
SCSIFLYKVFILFIL

SEQ ID NO: 27570 - protein, 15 aa, BK virus
CSIFLYKVFILFILS

SEQ ID NO: 27571 - protein, 15 aa, BK virus
SIFLYKVFILFILSS

SEQ ID NO: 27572 - protein, 15 aa, BK virus
IFLYKVFILFILSSS

SEQ ID NO: 27573 - protein, 15 aa, BK virus
FLYKVFILFILSSSP

SEQ ID NO: 27574 - protein, 15 aa, BK virus
LYKVFILFILSSSPP

SEQ ID NO: 27575 - protein, 15 aa, BK virus
YKVFILFILSSSPPL

SEQ ID NO: 27576 - protein, 15 aa, BK virus
KVFILFILSSSPPLS

SEQ ID NO: 27577 - protein, 15 aa, BK virus
VFILFILSSSPPLSG

SEQ ID NO: 27578 - protein, 15 aa, BK virus
AFLIKGRFPQAALSR

SEQ ID NO: 27579 - protein, 15 aa, BK virus
FLIKGRFPQAALSRP

SEQ ID NO: 27580 - protein, 15 aa, BK virus
LIKGRFPQAALSRPK

SEQ ID NO: 27581 - protein, 15 aa, BK virus
IKGRFPQAALSRPKR

SEQ ID NO: 27582 - protein, 15 aa, BK virus
KGRFPQAALSRPKRS

SEQ ID NO: 27583 - protein, 15 aa, BK virus
GRFPQAALSRPKRSM

SEQ ID NO: 27584 - protein, 15 aa, BK virus
RFPQAALSRPKRSMS

SEQ ID NO: 27585 - protein, 15 aa, BK virus
FPQAALSRPKRSMSS

SEQ ID NO: 27586 - protein, 15 aa, BK virus
PQAALSRPKRSMSSM

SEQ ID NO: 27587 - protein, 15 aa, BK virus
QAALSRPKRSMSSMD

SEQ ID NO: 27588 - protein, 15 aa, BK virus
AALSRPKRSMSSMDS

SEQ ID NO: 27589 - protein, 15 aa, BK virus
ALSRPKRSMSSMDSS

SEQ ID NO: 27590 - protein, 15 aa, BK virus
LSRPKRSMSSMDSSL

SEQ ID NO: 27591 - protein, 15 aa, BK virus
SRPKRSMSSMDSSLL

SEQ ID NO: 27592 - protein, 15 aa, BK virus
RPKRSMSSMDSSLLR

SEQ ID NO: 27593 - protein, 15 aa, BK virus
PKRSMSSMDSSLLRT

SEQ ID NO: 27594 - protein, 15 aa, BK virus
KRSMSSMDSSLLRTL

SEQ ID NO: 27595 - protein, 15 aa, BK virus
RSMSSMDSSLLRTLS

SEQ ID NO: 27596 - protein, 16 aa, BK virus
FCKNCKRIGISPNSFA

SEQ ID NO: 27597 - protein, 16 aa, BK virus
CKNCKRIGISPNSFAR

SEQ ID NO: 27598 - protein, 16 aa, BK virus
KNCKRIGISPNSFARP

SEQ ID NO: 27599 - protein, 16 aa, BK virus
NCKRIGISPNSFARPQ

SEQ ID NO: 27600 - protein, 16 aa, BK virus
CKRIGISPNSFARPQK

SEQ ID NO: 27601 - protein, 16 aa, BK virus
KRIGISPNSFARPQKK

SEQ ID NO: 27602 - protein, 16 aa, BK virus
RIGISPNSFARPQKKP

SEQ ID NO: 27603 - protein, 16 aa, BK virus
IGISPNSFARPQKKPP

SEQ ID NO: 27604 - protein, 16 aa, BK virus
GISPNSFARPQKKPPH

SEQ ID NO: 27605 - protein, 16 aa, BK virus
ISPNSFARPQKKPPHP

SEQ ID NO: 27606 - protein, 16 aa, BK virus
SPNSFARPQKKPPHPY

SEQ ID NO: 27607 - protein, 16 aa, BK virus
PNSFARPQKKPPHPYY

SEQ ID NO: 27608 - protein, 16 aa, BK virus
NSFARPQKKPPHPYYL

SEQ ID NO: 27609 - protein, 16 aa, BK virus
SFARPQKKPPHPYYLR

SEQ ID NO: 27610 - protein, 16 aa, BK virus
FARPQKKPPHPYYLRE

SEQ ID NO: 27611 - protein, 16 aa, BK virus
ARPQKKPPHPYYLRER

SEQ ID NO: 27612 - protein, 16 aa, BK virus
RPQKKPPHPYYLRERV

SEQ ID NO: 27613 - protein, 16 aa, BK virus
PQKKPPHPYYLRERVE

SEQ ID NO: 27614 - protein, 16 aa, BK virus
QKKPPHPYYLRERVEA

SEQ ID NO: 27615 - protein, 16 aa, BK virus
KKPPHPYYLRERVEAE

SEQ ID NO: 27616 - protein, 16 aa, BK virus
KPPHPYYLRERVEAEA

SEQ ID NO: 27617 - protein, 16 aa, BK virus
PPHPYYLRERVEAEAA

SEQ ID NO: 27618 - protein, 16 aa, BK virus
PHPYYLRERVEAEAAS

SEQ ID NO: 27619 - protein, 16 aa, BK virus
HPYYLRERVEAEAASA

SEQ ID NO: 27620 - protein, 16 aa, BK virus
PYYLRERVEAEAASAS

SEQ ID NO: 27621 - protein, 16 aa, BK virus
YYLRERVEAEAASASY

SEQ ID NO: 27622 - protein, 16 aa, BK virus
YLRERVEAEAASASYI

SEQ ID NO: 27623 - protein, 16 aa, BK virus
LRERVEAEAASASYIL

SEQ ID NO: 27624 - protein, 16 aa, BK virus
KKRPQGGAAYPWNAAK

SEQ ID NO: 27625 - protein, 16 aa, BK virus
KRPQGGAAYPWNAAKP

SEQ ID NO: 27626 - protein, 16 aa, BK virus
PQEGKCMTHRGMQPNH

SEQ ID NO: 27627 - protein, 16 aa, BK virus
QEGKCMTHRGMQPNHD

SEQ ID NO: 27628 - protein, 16 aa, BK virus
EGKCMTHRGMQPNHDL

SEQ ID NO: 27629 - protein, 16 aa, BK virus
GKCMTHRGMQPNHDLR

SEQ ID NO: 27630 - protein, 16 aa, BK virus
KCMTHRGMQPNHDLRK

SEQ ID NO: 27631 - protein, 16 aa, BK virus
CMTHRGMQPNHDLRKE

SEQ ID NO: 27632 - protein, 16 aa, BK virus
MTHRGMQPNHDLRKES

SEQ ID NO: 27633 - protein, 16 aa, BK virus
THRGMQPNHDLRKESA

SEQ ID NO: 27634 - protein, 16 aa, BK virus
LTGRSCLPMECSQTMT

SEQ ID NO: 27635 - protein, 16 aa, BK virus
TGRSCLPMECSQTMTS

SEQ ID NO: 27636 - protein, 16 aa, BK virus
GRSCLPMECSQTMTSG

SEQ ID NO: 27637 - protein, 16 aa, BK virus
RSCLPMECSQTMTSGR

SEQ ID NO: 27638 - protein, 16 aa, BK virus
SCLPMECSQTMTSGRK

SEQ ID NO: 27639 - protein, 16 aa, BK virus
CLPMECSQTMTSGRKV

SEQ ID NO: 27640 - protein, 16 aa, BK virus
LPMECSQTMTSGRKVH

SEQ ID NO: 27641 - protein, 16 aa, BK virus
PMECSQTMTSGRKVHD

SEQ ID NO: 27642 - protein, 16 aa, BK virus
MECSQTMTSGRKVHDR

SEQ ID NO: 27643 - protein, 16 aa, BK virus
ECSQTMTSGRKVHDRH

SEQ ID NO: 27644 - protein, 16 aa, BK virus
CSQTMTSGRKVHDRHV

SEQ ID NO: 27645 - protein, 16 aa, BK virus
SQTMTSGRKVHDRHVL

SEQ ID NO: 27646 - protein, 16 aa, BK virus
QTMTSGRKVHDRHVLR

SEQ ID NO: 27647 - protein, 16 aa, BK virus
TMTSGRKVHDRHVLRA

SEQ ID NO: 27648 - protein, 16 aa, BK virus
ESWPCPQLNWTKAMVL

SEQ ID NO: 27649 - protein, 16 aa, BK virus
SWPCPQLNWTKAMVLR

SEQ ID NO: 27650 - protein, 16 aa, BK virus
WPCPQLNWTKAMVLRQ

SEQ ID NO: 27651 - protein, 16 aa, BK virus
PCPQLNWTKAMVLRQL

SEQ ID NO: 27652 - protein, 16 aa, BK virus
CPQLNWTKAMVLRQLS

SEQ ID NO: 27653 - protein, 16 aa, BK virus
PQLNWTKAMVLRQLSR

SEQ ID NO: 27654 - protein, 16 aa, BK virus
QLNWTKAMVLRQLSRQ

SEQ ID NO: 27655 - protein, 16 aa, BK virus
LNWTKAMVLRQLSRQA

SEQ ID NO: 27656 - protein, 16 aa, BK virus
NWTKAMVLRQLSRQAS

SEQ ID NO: 27657 - protein, 16 aa, BK virus
WTKAMVLRQLSRQASV

SEQ ID NO: 27658 - protein, 16 aa, BK virus
TKAMVLRQLSRQASVK

SEQ ID NO: 27659 - protein, 16 aa, BK virus
KAMVLRQLSRQASVKV

SEQ ID NO: 27660 - protein, 16 aa, BK virus
AMVLRQLSRQASVKVG

SEQ ID NO: 27661 - protein, 16 aa, BK virus
MVLRQLSRQASVKVGK

SEQ ID NO: 27662 - protein, 16 aa, BK virus
VLRQLSRQASVKVGKT

SEQ ID NO: 27663 - protein, 16 aa, BK virus
LRQLSRQASVKVGKTW

SEQ ID NO: 27664 - protein, 16 aa, BK virus
RQLSRQASVKVGKTWT

SEQ ID NO: 27665 - protein, 16 aa, BK virus
QLSRQASVKVGKTWTG

SEQ ID NO: 27666 - protein, 16 aa, BK virus
LSRQASVKVGKTWTGT

SEQ ID NO: 27667 - protein, 16 aa, BK virus
SRQASVKVGKTWTGTK

SEQ ID NO: 27668 - protein, 16 aa, BK virus
RQASVKVGKTWTGTKK

SEQ ID NO: 27669 - protein, 16 aa, BK virus
QASVKVGKTWTGTKKR

SEQ ID NO: 27670 - protein, 16 aa, BK virus
ASVKVGKTWTGTKKRA

SEQ ID NO: 27671 - protein, 16 aa, BK virus
SVKVGKTWTGTKKRAQ

SEQ ID NO: 27672 - protein, 16 aa, BK virus
VKVGKTWTGTKKRAQR

SEQ ID NO: 27673 - protein, 16 aa, BK virus
KVGKTWTGTKKRAQRI

SEQ ID NO: 27674 - protein, 16 aa, BK virus
VGKTWTGTKKRAQRIF

SEQ ID NO: 27675 - protein, 16 aa, BK virus
GKTWTGTKKRAQRIFI

SEQ ID NO: 27676 - protein, 16 aa, BK virus
KTWTGTKKRAQRIFIF

SEQ ID NO: 27677 - protein, 16 aa, BK virus
TWTGTKKRAQRIFIFI

SEQ ID NO: 27678 - protein, 16 aa, BK virus
WTGTKKRAQRIFIFIL

SEQ ID NO: 27679 - protein, 16 aa, BK virus
TGTKKRAQRIFIFILE

SEQ ID NO: 27680 - protein, 16 aa, BK virus
GTKKRAQRIFIFILEL

SEQ ID NO: 27681 - protein, 16 aa, BK virus
TKKRAQRIFIFILELL

SEQ ID NO: 27682 - protein, 16 aa, BK virus
KKRAQRIFIFILELLL

SEQ ID NO: 27683 - protein, 16 aa, BK virus
KRAQRIFIFILELLLE

SEQ ID NO: 27684 - protein, 16 aa, BK virus
RAQRIFIFILELLLEF

SEQ ID NO: 27685 - protein, 16 aa, BK virus
AQRIFIFILELLLEFC

SEQ ID NO: 27686 - protein, 16 aa, BK virus
QRIFIFILELLLEFCR

SEQ ID NO: 27687 - protein, 16 aa, BK virus
RIFIFILELLLEFCRG

SEQ ID NO: 27688 - protein, 16 aa, BK virus
IFIFILELLLEFCRGE

SEQ ID NO: 27689 - protein, 16 aa, BK virus
FIFILELLLEFCRGED

SEQ ID NO: 27690 - protein, 16 aa, BK virus
IFILELLLEFCRGEDS

SEQ ID NO: 27691 - protein, 16 aa, BK virus
FILELLLEFCRGEDSV

SEQ ID NO: 27692 - protein, 16 aa, BK virus
ILELLLEFCRGEDSVD

SEQ ID NO: 27693 - protein, 16 aa, BK virus
LELLLEFCRGEDSVDG

SEQ ID NO: 27694 - protein, 16 aa, BK virus
ELLLEFCRGEDSVDGK

SEQ ID NO: 27695 - protein, 16 aa, BK virus
LLLEFCRGEDSVDGKN

SEQ ID NO: 27696 - protein, 16 aa, BK virus
LLEFCRGEDSVDGKNK

SEQ ID NO: 27697 - protein, 16 aa, BK virus
LEFCRGEDSVDGKNKS

SEQ ID NO: 27698 - protein, 16 aa, BK virus
EFCRGEDSVDGKNKST

SEQ ID NO: 27699 - protein, 16 aa, BK virus
FCRGEDSVDGKNKSTT

SEQ ID NO: 27700 - protein, 16 aa, BK virus
CRGEDSVDGKNKSTTA

SEQ ID NO: 27701 - protein, 16 aa, BK virus
RGEDSVDGKNKSTTAL

SEQ ID NO: 27702 - protein, 16 aa, BK virus
GEDSVDGKNKSTTALP

SEQ ID NO: 27703 - protein, 16 aa, BK virus
EDSVDGKNKSTTALPA

SEQ ID NO: 27704 - protein, 16 aa, BK virus
DSVDGKNKSTTALPAV

SEQ ID NO: 27705 - protein, 16 aa, BK virus
SVDGKNKSTTALPAVK

SEQ ID NO: 27706 - protein, 16 aa, BK virus
VDGKNKSTTALPAVKD

SEQ ID NO: 27707 - protein, 16 aa, BK virus
DGKNKSTTALPAVKDS

SEQ ID NO: 27708 - protein, 16 aa, BK virus
GKNKSTTALPAVKDSV

SEQ ID NO: 27709 - protein, 16 aa, BK virus
KNKSTTALPAVKDSVK

SEQ ID NO: 27710 - protein, 16 aa, BK virus
NKSTTALPAVKDSVKD

SEQ ID NO: 27711 - protein, 16 aa, BK virus
KSTTALPAVKDSVKDS

SEQ ID NO: 27712 - protein, 16 aa, BK virus
VSNPFFFVFPGSWVLL

SEQ ID NO: 27713 - protein, 16 aa, BK virus
LPVYLRLLLPQDFQWL

SEQ ID NO: 27714 - protein, 16 aa, BK virus
PVYLRLLLPQDFQWLK

SEQ ID NO: 27715 - protein, 16 aa, BK virus
VYLRLLLPQDFQWLKL

SEQ ID NO: 27716 - protein, 16 aa, BK virus
YLRLLLPQDFQWLKLL

SEQ ID NO: 27717 - protein, 16 aa, BK virus
LRLLLPQDFQWLKLLL

SEQ ID NO: 27718 - protein, 16 aa, BK virus
RLLLPQDFQWLKLLLG

SEQ ID NO: 27719 - protein, 16 aa, BK virus
LLLPQDFQWLKLLLGR

SEQ ID NO: 27720 - protein, 16 aa, BK virus
LLPQDFQWLKLLLGRL

SEQ ID NO: 27721 - protein, 16 aa, BK virus
LPQDFQWLKLLLGRLL

SEQ ID NO: 27722 - protein, 16 aa, BK virus
PQDFQWLKLLLGRLLL

SEQ ID NO: 27723 - protein, 16 aa, BK virus
QDFQWLKLLLGRLLLL

SEQ ID NO: 27724 - protein, 16 aa, BK virus
ASISNQAWLWNCLTQM

SEQ ID NO: 27725 - protein, 16 aa, BK virus
SISNQAWLWNCLTQMS

SEQ ID NO: 27726 - protein, 16 aa, BK virus
ISNQAWLWNCLTQMST

SEQ ID NO: 27727 - protein, 16 aa, BK virus
SNQAWLWNCLTQMSTM

SEQ ID NO: 27728 - protein, 16 aa, BK virus
NQAWLWNCLTQMSTMI

SEQ ID NO: 27729 - protein, 16 aa, BK virus
QAWLWNCLTQMSTMIF

SEQ ID NO: 27730 - protein, 16 aa, BK virus
AWLWNCLTQMSTMIFC

SEQ ID NO: 27731 - protein, 16 aa, BK virus
WLWNCLTQMSTMIFCF

SEQ ID NO: 27732 - protein, 16 aa, BK virus
LWNCLTQMSTMIFCFL

SEQ ID NO: 27733 - protein, 16 aa, BK virus
WNCLTQMSTMIFCFLV

SEQ ID NO: 27734 - protein, 16 aa, BK virus
ILLLIIFNTLILGIGV

SEQ ID NO: 27735 - protein, 16 aa, BK virus
LLLIIFNTLILGIGVL

SEQ ID NO: 27736 - protein, 16 aa, BK virus
LLIIFNTLILGIGVLL

SEQ ID NO: 27737 - protein, 16 aa, BK virus
LIIFNTLILGIGVLLC

SEQ ID NO: 27738 - protein, 16 aa, BK virus
IIFNTLILGIGVLLCL

SEQ ID NO: 27739 - protein, 16 aa, BK virus
IFNTLILGIGVLLCLL

SEQ ID NO: 27740 - protein, 16 aa, BK virus
FNTLILGIGVLLCLLL

SEQ ID NO: 27741 - protein, 16 aa, BK virus
NTLILGIGVLLCLLLF

SEQ ID NO: 27742 - protein, 16 aa, BK virus
TLILGIGVLLCLLLFP

SEQ ID NO: 27743 - protein, 16 aa, BK virus
LILGIGVLLCLLLFPR

SEQ ID NO: 27744 - protein, 16 aa, BK virus
ILGIGVLLCLLLFPRL

SEQ ID NO: 27745 - protein, 16 aa, BK virus
LGIGVLLCLLLFPRLC

SEQ ID NO: 27746 - protein, 16 aa, BK virus
GIGVLLCLLLFPRLCG

SEQ ID NO: 27747 - protein, 16 aa, BK virus
IGVLLCLLLFPRLCGM

SEQ ID NO: 27748 - protein, 16 aa, BK virus
GVLLCLLLFPRLCGML

SEQ ID NO: 27749 - protein, 16 aa, BK virus
VLLCLLLFPRLCGMLL

SEQ ID NO: 27750 - protein, 16 aa, BK virus
LLCLLLFPRLCGMLLG

SEQ ID NO: 27751 - protein, 16 aa, BK virus
LCLLLFPRLCGMLLGM

SEQ ID NO: 27752 - protein, 16 aa, BK virus
CLLLFPRLCGMLLGMI

SEQ ID NO: 27753 - protein, 16 aa, BK virus
LLLFPRLCGMLLGMIY

SEQ ID NO: 27754 - protein, 16 aa, BK virus
LLFPRLCGMLLGMIYL

SEQ ID NO: 27755 - protein, 16 aa, BK virus
LFPRLCGMLLGMIYLL

SEQ ID NO: 27756 - protein, 16 aa, BK virus
PHRNCREEQKDFLETP

SEQ ID NO: 27757 - protein, 16 aa, BK virus
HRNCREEQKDFLETPW

SEQ ID NO: 27758 - protein, 16 aa, BK virus
RNCREEQKDFLETPWL

SEQ ID NO: 27759 - protein, 16 aa, BK virus
NCREEQKDFLETPWLD

SEQ ID NO: 27760 - protein, 16 aa, BK virus
CREEQKDFLETPWLDF

SEQ ID NO: 27761 - protein, 16 aa, BK virus
REEQKDFLETPWLDFW

SEQ ID NO: 27762 - protein, 16 aa, BK virus
EEQKDFLETPWLDFWR

SEQ ID NO: 27763 - protein, 16 aa, BK virus
EQKDFLETPWLDFWRK

SEQ ID NO: 27764 - protein, 16 aa, BK virus
QKDFLETPWLDFWRKL

SEQ ID NO: 27765 - protein, 16 aa, BK virus
KDFLETPWLDFWRKLP

SEQ ID NO: 27766 - protein, 16 aa, BK virus
DFLETPWLDFWRKLPG

SEQ ID NO: 27767 - protein, 16 aa, BK virus
FLETPWLDFWRKLPGQ

SEQ ID NO: 27768 - protein, 16 aa, BK virus
LETPWLDFWRKLPGQL

SEQ ID NO: 27769 - protein, 16 aa, BK virus
TFIIIFNNIILIFPLL

SEQ ID NO: 27770 - protein, 16 aa, BK virus
FIIIFNNIILIFPLLG

SEQ ID NO: 27771 - protein, 16 aa, BK virus
IIIFNNIILIFPLLGP

SEQ ID NO: 27772 - protein, 16 aa, BK virus
IIFNNIILIFPLLGPQ

SEQ ID NO: 27773 - protein, 16 aa, BK virus
IFNNIILIFPLLGPQW

SEQ ID NO: 27774 - protein, 16 aa, BK virus
FNNIILIFPLLGPQWL

SEQ ID NO: 27775 - protein, 16 aa, BK virus
NNIILIFPLLGPQWLD

SEQ ID NO: 27776 - protein, 16 aa, BK virus
NIILIFPLLGPQWLDK

SEQ ID NO: 27777 - protein, 16 aa, BK virus
KKLLPQEVLIKELLLN

SEQ ID NO: 27778 - protein, 16 aa, BK virus
KLLPQEVLIKELLLNG

SEQ ID NO: 27779 - protein, 16 aa, BK virus
LLPQEVLIKELLLNGC

SEQ ID NO: 27780 - protein, 16 aa, BK virus
LPQEVLIKELLLNGCC

SEQ ID NO: 27781 - protein, 16 aa, BK virus
PQEVLIKELLLNGCCL

SEQ ID NO: 27782 - protein, 16 aa, BK virus
QEVLIKELLLNGCCLY

SEQ ID NO: 27783 - protein, 16 aa, BK virus
EVLIKELLLNGCCLYF

SEQ ID NO: 27784 - protein, 16 aa, BK virus
HLLLKHMKMAPTKRKG

SEQ ID NO: 27785 - protein, 16 aa, BK virus
LLLKHMKMAPTKRKGE

SEQ ID NO: 27786 - protein, 16 aa, BK virus
LLKHMKMAPTKRKGEC

SEQ ID NO: 27787 - protein, 16 aa, BK virus
LKHMKMAPTKRKGECP

SEQ ID NO: 27788 - protein, 16 aa, BK virus
KHMKMAPTKRKGECPG

SEQ ID NO: 27789 - protein, 16 aa, BK virus
HMKMAPTKRKGECPGA

SEQ ID NO: 27790 - protein, 16 aa, BK virus
MKMAPTKRKGECPGAA

SEQ ID NO: 27791 - protein, 16 aa, BK virus
KMAPTKRKGECPGAAP

SEQ ID NO: 27792 - protein, 16 aa, BK virus
MAPTKRKGECPGAAPK

SEQ ID NO: 27793 - protein, 16 aa, BK virus
APTKRKGECPGAAPKK

SEQ ID NO: 27794 - protein, 16 aa, BK virus
PTKRKGECPGAAPKKP

SEQ ID NO: 27795 - protein, 16 aa, BK virus
TKRKGECPGAAPKKPK

SEQ ID NO: 27796 - protein, 16 aa, BK virus
KRKGECPGAAPKKPKE

SEQ ID NO: 27797 - protein, 16 aa, BK virus
RKGECPGAAPKKPKEP

SEQ ID NO: 27798 - protein, 16 aa, BK virus
KGECPGAAPKKPKEPV

SEQ ID NO: 27799 - protein, 16 aa, BK virus
GECPGAAPKKPKEPVQ

SEQ ID NO: 27800 - protein, 16 aa, BK virus
ECPGAAPKKPKEPVQV

SEQ ID NO: 27801 - protein, 16 aa, BK virus
CPGAAPKKPKEPVQVP

SEQ ID NO: 27802 - protein, 16 aa, BK virus
PGAAPKKPKEPVQVPK

SEQ ID NO: 27803 - protein, 16 aa, BK virus
GAAPKKPKEPVQVPKL

SEQ ID NO: 27804 - protein, 16 aa, BK virus
AAPKKPKEPVQVPKLL

SEQ ID NO: 27805 - protein, 16 aa, BK virus
APKKPKEPVQVPKLLI

SEQ ID NO: 27806 - protein, 16 aa, BK virus
PKKPKEPVQVPKLLIK

SEQ ID NO: 27807 - protein, 16 aa, BK virus
KKPKEPVQVPKLLIKG

SEQ ID NO: 27808 - protein, 16 aa, BK virus
KPKEPVQVPKLLIKGG

SEQ ID NO: 27809 - protein, 16 aa, BK virus
PKEPVQVPKLLIKGGV

SEQ ID NO: 27810 - protein, 16 aa, BK virus
KEPVQVPKLLIKGGVE

SEQ ID NO: 27811 - protein, 16 aa, BK virus
EPVQVPKLLIKGGVEV

SEQ ID NO: 27812 - protein, 16 aa, BK virus
PVQVPKLLIKGGVEVL

SEQ ID NO: 27813 - protein, 16 aa, BK virus
VQVPKLLIKGGVEVLE

SEQ ID NO: 27814 - protein, 16 aa, BK virus
QVPKLLIKGGVEVLEV

SEQ ID NO: 27815 - protein, 16 aa, BK virus
VPKLLIKGGVEVLEVK

SEQ ID NO: 27816 - protein, 16 aa, BK virus
PKLLIKGGVEVLEVKT

SEQ ID NO: 27817 - protein, 16 aa, BK virus
KLLIKGGVEVLEVKTG

SEQ ID NO: 27818 - protein, 16 aa, BK virus
LLIKGGVEVLEVKTGV

SEQ ID NO: 27819 - protein, 16 aa, BK virus
LIKGGVEVLEVKTGVD

SEQ ID NO: 27820 - protein, 16 aa, BK virus
IKGGVEVLEVKTGVDA

SEQ ID NO: 27821 - protein, 16 aa, BK virus
KGGVEVLEVKTGVDAI

SEQ ID NO: 27822 - protein, 16 aa, BK virus
GGVEVLEVKTGVDAIT

SEQ ID NO: 27823 - protein, 16 aa, BK virus
GVEVLEVKTGVDAITE

SEQ ID NO: 27824 - protein, 16 aa, BK virus
VEVLEVKTGVDAITEV

SEQ ID NO: 27825 - protein, 16 aa, BK virus
EVLEVKTGVDAITEVE

SEQ ID NO: 27826 - protein, 16 aa, BK virus
VLEVKTGVDAITEVEC

SEQ ID NO: 27827 - protein, 16 aa, BK virus
LEVKTGVDAITEVECF

SEQ ID NO: 27828 - protein, 16 aa, BK virus
EVKTGVDAITEVECFL

SEQ ID NO: 27829 - protein, 16 aa, BK virus
VKTGVDAITEVECFLN

SEQ ID NO: 27830 - protein, 16 aa, BK virus
KTGVDAITEVECFLNP

SEQ ID NO: 27831 - protein, 16 aa, BK virus
TGVDAITEVECFLNPE

SEQ ID NO: 27832 - protein, 16 aa, BK virus
GVDAITEVECFLNPEM

SEQ ID NO: 27833 - protein, 16 aa, BK virus
VDAITEVECFLNPEMG

SEQ ID NO: 27834 - protein, 16 aa, BK virus
DAITEVECFLNPEMGD

SEQ ID NO: 27835 - protein, 16 aa, BK virus
AITEVECFLNPEMGDP

SEQ ID NO: 27836 - protein, 16 aa, BK virus
ITEVECFLNPEMGDPD

SEQ ID NO: 27837 - protein, 16 aa, BK virus
TEVECFLNPEMGDPDE

SEQ ID NO: 27838 - protein, 16 aa, BK virus
EVECFLNPEMGDPDEN

SEQ ID NO: 27839 - protein, 16 aa, BK virus
VECFLNPEMGDPDENL

SEQ ID NO: 27840 - protein, 16 aa, BK virus
ECFLNPEMGDPDENLR

SEQ ID NO: 27841 - protein, 16 aa, BK virus
CFLNPEMGDPDENLRG

SEQ ID NO: 27842 - protein, 16 aa, BK virus
FLNPEMGDPDENLRGF

SEQ ID NO: 27843 - protein, 16 aa, BK virus
LNPEMGDPDENLRGFS

SEQ ID NO: 27844 - protein, 16 aa, BK virus
NPEMGDPDENLRGFSL

SEQ ID NO: 27845 - protein, 16 aa, BK virus
PEMGDPDENLRGFSLK

SEQ ID NO: 27846 - protein, 16 aa, BK virus
EMGDPDENLRGFSLKL

SEQ ID NO: 27847 - protein, 16 aa, BK virus
MGDPDENLRGFSLKLS

SEQ ID NO: 27848 - protein, 16 aa, BK virus
GDPDENLRGFSLKLSA

SEQ ID NO: 27849 - protein, 16 aa, BK virus
DPDENLRGFSLKLSAE

SEQ ID NO: 27850 - protein, 16 aa, BK virus
PDENLRGFSLKLSAEN

SEQ ID NO: 27851 - protein, 16 aa, BK virus
DENLRGFSLKLSAEND

SEQ ID NO: 27852 - protein, 16 aa, BK virus
ENLRGFSLKLSAENDF

SEQ ID NO: 27853 - protein, 16 aa, BK virus
NLRGFSLKLSAENDFS

SEQ ID NO: 27854 - protein, 16 aa, BK virus
LRGFSLKLSAENDFSS

SEQ ID NO: 27855 - protein, 16 aa, BK virus
RGFSLKLSAENDFSSD

SEQ ID NO: 27856 - protein, 16 aa, BK virus
GFSLKLSAENDFSSDS

SEQ ID NO: 27857 - protein, 16 aa, BK virus
FSLKLSAENDFSSDSP

SEQ ID NO: 27858 - protein, 16 aa, BK virus
SLKLSAENDFSSDSPE

SEQ ID NO: 27859 - protein, 16 aa, BK virus
LKLSAENDFSSDSPER

SEQ ID NO: 27860 - protein, 16 aa, BK virus
KLSAENDFSSDSPERK

SEQ ID NO: 27861 - protein, 16 aa, BK virus
LSAENDFSSDSPERKM

SEQ ID NO: 27862 - protein, 16 aa, BK virus
SAENDFSSDSPERKML

SEQ ID NO: 27863 - protein, 16 aa, BK virus
AENDFSSDSPERKMLP

SEQ ID NO: 27864 - protein, 16 aa, BK virus
ENDFSSDSPERKMLPC

SEQ ID NO: 27865 - protein, 16 aa, BK virus
NDFSSDSPERKMLPCY

SEQ ID NO: 27866 - protein, 16 aa, BK virus
DFSSDSPERKMLPCYS

SEQ ID NO: 27867 - protein, 16 aa, BK virus
FSSDSPERKMLPCYST

SEQ ID NO: 27868 - protein, 16 aa, BK virus
SSDSPERKMLPCYSTA

SEQ ID NO: 27869 - protein, 16 aa, BK virus
SDSPERKMLPCYSTAR

SEQ ID NO: 27870 - protein, 16 aa, BK virus
DSPERKMLPCYSTARI

SEQ ID NO: 27871 - protein, 16 aa, BK virus
SPERKMLPCYSTARIP

SEQ ID NO: 27872 - protein, 16 aa, BK virus
PERKMLPCYSTARIPL

SEQ ID NO: 27873 - protein, 16 aa, BK virus
ERKMLPCYSTARIPLP

SEQ ID NO: 27874 - protein, 16 aa, BK virus
RKMLPCYSTARIPLPN

SEQ ID NO: 27875 - protein, 16 aa, BK virus
KMLPCYSTARIPLPNL

SEQ ID NO: 27876 - protein, 16 aa, BK virus
MLPCYSTARIPLPNLN

SEQ ID NO: 27877 - protein, 16 aa, BK virus
LPCYSTARIPLPNLNE

SEQ ID NO: 27878 - protein, 16 aa, BK virus
PCYSTARIPLPNLNED

SEQ ID NO: 27879 - protein, 16 aa, BK virus
CYSTARIPLPNLNEDL

SEQ ID NO: 27880 - protein, 16 aa, BK virus
YSTARIPLPNLNEDLT

SEQ ID NO: 27881 - protein, 16 aa, BK virus
STARIPLPNLNEDLTC

SEQ ID NO: 27882 - protein, 16 aa, BK virus
TARIPLPNLNEDLTCG

SEQ ID NO: 27883 - protein, 16 aa, BK virus
ARIPLPNLNEDLTCGN

SEQ ID NO: 27884 - protein, 16 aa, BK virus
RIPLPNLNEDLTCGNL

SEQ ID NO: 27885 - protein, 16 aa, BK virus
IPLPNLNEDLTCGNLL

SEQ ID NO: 27886 - protein, 16 aa, BK virus
PLPNLNEDLTCGNLLM

SEQ ID NO: 27887 - protein, 16 aa, BK virus
LPNLNEDLTCGNLLMW

SEQ ID NO: 27888 - protein, 16 aa, BK virus
PNLNEDLTCGNLLMWE

SEQ ID NO: 27889 - protein, 16 aa, BK virus
NLNEDLTCGNLLMWEA

SEQ ID NO: 27890 - protein, 16 aa, BK virus
LNEDLTCGNLLMWEAV

SEQ ID NO: 27891 - protein, 16 aa, BK virus
NEDLTCGNLLMWEAVT

SEQ ID NO: 27892 - protein, 16 aa, BK virus
EDLTCGNLLMWEAVTV

SEQ ID NO: 27893 - protein, 16 aa, BK virus
DLTCGNLLMWEAVTVQ

SEQ ID NO: 27894 - protein, 16 aa, BK virus
LTCGNLLMWEAVTVQT

SEQ ID NO: 27895 - protein, 16 aa, BK virus
TCGNLLMWEAVTVQTE

SEQ ID NO: 27896 - protein, 16 aa, BK virus
CGNLLMWEAVTVQTEV

SEQ ID NO: 27897 - protein, 16 aa, BK virus
GNLLMWEAVTVQTEVI

SEQ ID NO: 27898 - protein, 16 aa, BK virus
NLLMWEAVTVQTEVIG

SEQ ID NO: 27899 - protein, 16 aa, BK virus
LLMWEAVTVQTEVIGI

SEQ ID NO: 27900 - protein, 16 aa, BK virus
LMWEAVTVQTEVIGIT

SEQ ID NO: 27901 - protein, 16 aa, BK virus
MWEAVTVQTEVIGITS

SEQ ID NO: 27902 - protein, 16 aa, BK virus
WEAVTVQTEVIGITSM

SEQ ID NO: 27903 - protein, 16 aa, BK virus
EAVTVQTEVIGITSML

SEQ ID NO: 27904 - protein, 16 aa, BK virus
AVTVQTEVIGITSMLN

SEQ ID NO: 27905 - protein, 16 aa, BK virus
VTVQTEVIGITSMLNL

SEQ ID NO: 27906 - protein, 16 aa, BK virus
TVQTEVIGITSMLNLH

SEQ ID NO: 27907 - protein, 16 aa, BK virus
VQTEVIGITSMLNLHA

SEQ ID NO: 27908 - protein, 16 aa, BK virus
QTEVIGITSMLNLHAG

SEQ ID NO: 27909 - protein, 16 aa, BK virus
TEVIGITSMLNLHAGS

SEQ ID NO: 27910 - protein, 16 aa, BK virus
EVIGITSMLNLHAGSQ

SEQ ID NO: 27911 - protein, 16 aa, BK virus
VIGITSMLNLHAGSQK

SEQ ID NO: 27912 - protein, 16 aa, BK virus
IGITSMLNLHAGSQKV

SEQ ID NO: 27913 - protein, 16 aa, BK virus
GITSMLNLHAGSQKVH

SEQ ID NO: 27914 - protein, 16 aa, BK virus
ITSMLNLHAGSQKVHE

SEQ ID NO: 27915 - protein, 16 aa, BK virus
TSMLNLHAGSQKVHEH

SEQ ID NO: 27916 - protein, 16 aa, BK virus
SMLNLHAGSQKVHEHG

SEQ ID NO: 27917 - protein, 16 aa, BK virus
MLNLHAGSQKVHEHGG

SEQ ID NO: 27918 - protein, 16 aa, BK virus
LNLHAGSQKVHEHGGG

SEQ ID NO: 27919 - protein, 16 aa, BK virus
NLHAGSQKVHEHGGGK

SEQ ID NO: 27920 - protein, 16 aa, BK virus
LHAGSQKVHEHGGGKP

SEQ ID NO: 27921 - protein, 16 aa, BK virus
HAGSQKVHEHGGGKPI

SEQ ID NO: 27922 - protein, 16 aa, BK virus
AGSQKVHEHGGGKPIQ

SEQ ID NO: 27923 - protein, 16 aa, BK virus
GSQKVHEHGGGKPIQG

SEQ ID NO: 27924 - protein, 16 aa, BK virus
SQKVHEHGGGKPIQGS

SEQ ID NO: 27925 - protein, 16 aa, BK virus
QKVHEHGGGKPIQGSN

SEQ ID NO: 27926 - protein, 16 aa, BK virus
KVHEHGGGKPIQGSNF

SEQ ID NO: 27927 - protein, 16 aa, BK virus
VHEHGGGKPIQGSNFH

SEQ ID NO: 27928 - protein, 16 aa, BK virus
HEHGGGKPIQGSNFHF

SEQ ID NO: 27929 - protein, 16 aa, BK virus
EHGGGKPIQGSNFHFF

SEQ ID NO: 27930 - protein, 16 aa, BK virus
HGGGKPIQGSNFHFFA

SEQ ID NO: 27931 - protein, 16 aa, BK virus
GGGKPIQGSNFHFFAV

SEQ ID NO: 27932 - protein, 16 aa, BK virus
GGKPIQGSNFHFFAVG

SEQ ID NO: 27933 - protein, 16 aa, BK virus
GKPIQGSNFHFFAVGG

SEQ ID NO: 27934 - protein, 16 aa, BK virus
KPIQGSNFHFFAVGGE

SEQ ID NO: 27935 - protein, 16 aa, BK virus
PIQGSNFHFFAVGGEP

SEQ ID NO: 27936 - protein, 16 aa, BK virus
IQGSNFHFFAVGGEPL

SEQ ID NO: 27937 - protein, 16 aa, BK virus
QGSNFHFFAVGGEPLE

SEQ ID NO: 27938 - protein, 16 aa, BK virus
GSNFHFFAVGGEPLEM

SEQ ID NO: 27939 - protein, 16 aa, BK virus
SNFHFFAVGGEPLEMQ

SEQ ID NO: 27940 - protein, 16 aa, BK virus
NFHFFAVGGEPLEMQG

SEQ ID NO: 27941 - protein, 16 aa, BK virus
FHFFAVGGEPLEMQGV

SEQ ID NO: 27942 - protein, 16 aa, BK virus
HFFAVGGEPLEMQGVL

SEQ ID NO: 27943 - protein, 16 aa, BK virus
FFAVGGEPLEMQGVLM

SEQ ID NO: 27944 - protein, 16 aa, BK virus
FAVGGEPLEMQGVLMN

SEQ ID NO: 27945 - protein, 16 aa, BK virus
AVGGEPLEMQGVLMNY

SEQ ID NO: 27946 - protein, 16 aa, BK virus
VGGEPLEMQGVLMNYR

SEQ ID NO: 27947 - protein, 16 aa, BK virus
GGEPLEMQGVLMNYRS

SEQ ID NO: 27948 - protein, 16 aa, BK virus
GEPLEMQGVLMNYRSK

SEQ ID NO: 27949 - protein, 16 aa, BK virus
EPLEMQGVLMNYRSKY

SEQ ID NO: 27950 - protein, 16 aa, BK virus
PLEMQGVLMNYRSKYP

SEQ ID NO: 27951 - protein, 16 aa, BK virus
LEMQGVLMNYRSKYPD

SEQ ID NO: 27952 - protein, 16 aa, BK virus
EMQGVLMNYRSKYPDG

SEQ ID NO: 27953 - protein, 16 aa, BK virus
MQGVLMNYRSKYPDGT

SEQ ID NO: 27954 - protein, 16 aa, BK virus
QGVLMNYRSKYPDGTI

SEQ ID NO: 27955 - protein, 16 aa, BK virus
GVLMNYRSKYPDGTIT

SEQ ID NO: 27956 - protein, 16 aa, BK virus
VLMNYRSKYPDGTITP

SEQ ID NO: 27957 - protein, 16 aa, BK virus
LMNYRSKYPDGTITPK

SEQ ID NO: 27958 - protein, 16 aa, BK virus
MNYRSKYPDGTITPKN

SEQ ID NO: 27959 - protein, 16 aa, BK virus
NYRSKYPDGTITPKNP

SEQ ID NO: 27960 - protein, 16 aa, BK virus
YRSKYPDGTITPKNPT

SEQ ID NO: 27961 - protein, 16 aa, BK virus
RSKYPDGTITPKNPTA

SEQ ID NO: 27962 - protein, 16 aa, BK virus
SKYPDGTITPKNPTAQ

SEQ ID NO: 27963 - protein, 16 aa, BK virus
KYPDGTITPKNPTAQS

SEQ ID NO: 27964 - protein, 16 aa, BK virus
YPDGTITPKNPTAQSQ

SEQ ID NO: 27965 - protein, 16 aa, BK virus
PDGTITPKNPTAQSQV

SEQ ID NO: 27966 - protein, 16 aa, BK virus
DGTITPKNPTAQSQVM

SEQ ID NO: 27967 - protein, 16 aa, BK virus
GTITPKNPTAQSQVMN

SEQ ID NO: 27968 - protein, 16 aa, BK virus
TITPKNPTAQSQVMNT

SEQ ID NO: 27969 - protein, 16 aa, BK virus
ITPKNPTAQSQVMNTD

SEQ ID NO: 27970 - protein, 16 aa, BK virus
TPKNPTAQSQVMNTDH

SEQ ID NO: 27971 - protein, 16 aa, BK virus
PKNPTAQSQVMNTDHK

SEQ ID NO: 27972 - protein, 16 aa, BK virus
KNPTAQSQVMNTDHKA

SEQ ID NO: 27973 - protein, 16 aa, BK virus
NPTAQSQVMNTDHKAY

SEQ ID NO: 27974 - protein, 16 aa, BK virus
PTAQSQVMNTDHKAYL

SEQ ID NO: 27975 - protein, 16 aa, BK virus
TAQSQVMNTDHKAYLD

SEQ ID NO: 27976 - protein, 16 aa, BK virus
AQSQVMNTDHKAYLDK

SEQ ID NO: 27977 - protein, 16 aa, BK virus
QSQVMNTDHKAYLDKN

SEQ ID NO: 27978 - protein, 16 aa, BK virus
SQVMNTDHKAYLDKNN

SEQ ID NO: 27979 - protein, 16 aa, BK virus
QVMNTDHKAYLDKNNA

SEQ ID NO: 27980 - protein, 16 aa, BK virus
VMNTDHKAYLDKNNAY

SEQ ID NO: 27981 - protein, 16 aa, BK virus
MNTDHKAYLDKNNAYP

SEQ ID NO: 27982 - protein, 16 aa, BK virus
NTDHKAYLDKNNAYPV

SEQ ID NO: 27983 - protein, 16 aa, BK virus
TDHKAYLDKNNAYPVE

SEQ ID NO: 27984 - protein, 16 aa, BK virus
DHKAYLDKNNAYPVEC

SEQ ID NO: 27985 - protein, 16 aa, BK virus
HKAYLDKNNAYPVECW

SEQ ID NO: 27986 - protein, 16 aa, BK virus
KAYLDKNNAYPVECWV

SEQ ID NO: 27987 - protein, 16 aa, BK virus
AYLDKNNAYPVECWVP

SEQ ID NO: 27988 - protein, 16 aa, BK virus
YLDKNNAYPVECWVPD

SEQ ID NO: 27989 - protein, 16 aa, BK virus
LDKNNAYPVECWVPDP

SEQ ID NO: 27990 - protein, 16 aa, BK virus
DKNNAYPVECWVPDPS

SEQ ID NO: 27991 - protein, 16 aa, BK virus
KNNAYPVECWVPDPSR

SEQ ID NO: 27992 - protein, 16 aa, BK virus
NNAYPVECWVPDPSRN

SEQ ID NO: 27993 - protein, 16 aa, BK virus
NAYPVECWVPDPSRNE

SEQ ID NO: 27994 - protein, 16 aa, BK virus
AYPVECWVPDPSRNEN

SEQ ID NO: 27995 - protein, 16 aa, BK virus
YPVECWVPDPSRNENA

SEQ ID NO: 27996 - protein, 16 aa, BK virus
PVECWVPDPSRNENAR

SEQ ID NO: 27997 - protein, 16 aa, BK virus
VECWVPDPSRNENARY

SEQ ID NO: 27998 - protein, 16 aa, BK virus
ECWVPDPSRNENARYF

SEQ ID NO: 27999 - protein, 16 aa, BK virus
CWVPDPSRNENARYFG

SEQ ID NO: 28000 - protein, 16 aa, BK virus
WVPDPSRNENARYFGT

SEQ ID NO: 28001 - protein, 16 aa, BK virus
VPDPSRNENARYFGTF

SEQ ID NO: 28002 - protein, 16 aa, BK virus
PDPSRNENARYFGTFT

SEQ ID NO: 28003 - protein, 16 aa, BK virus
DPSRNENARYFGTFTG

SEQ ID NO: 28004 - protein, 16 aa, BK virus
PSRNENARYFGTFTGG

SEQ ID NO: 28005 - protein, 16 aa, BK virus
SRNENARYFGTFTGGE

SEQ ID NO: 28006 - protein, 16 aa, BK virus
RNENARYFGTFTGGEN

SEQ ID NO: 28007 - protein, 16 aa, BK virus
NENARYFGTFTGGENV

SEQ ID NO: 28008 - protein, 16 aa, BK virus
ENARYFGTFTGGENVP

SEQ ID NO: 28009 - protein, 16 aa, BK virus
NARYFGTFTGGENVPP

SEQ ID NO: 28010 - protein, 16 aa, BK virus
ARYFGTFTGGENVPPV

SEQ ID NO: 28011 - protein, 16 aa, BK virus
RYFGTFTGGENVPPVL

SEQ ID NO: 28012 - protein, 16 aa, BK virus
YFGTFTGGENVPPVLH

SEQ ID NO: 28013 - protein, 16 aa, BK virus
FGTFTGGENVPPVLHV

SEQ ID NO: 28014 - protein, 16 aa, BK virus
GTFTGGENVPPVLHVT

SEQ ID NO: 28015 - protein, 16 aa, BK virus
TFTGGENVPPVLHVTN

SEQ ID NO: 28016 - protein, 16 aa, BK virus
FTGGENVPPVLHVTNT

SEQ ID NO: 28017 - protein, 16 aa, BK virus
TGGENVPPVLHVTNTA

SEQ ID NO: 28018 - protein, 16 aa, BK virus
GGENVPPVLHVTNTAT

SEQ ID NO: 28019 - protein, 16 aa, BK virus
GENVPPVLHVTNTATT

SEQ ID NO: 28020 - protein, 16 aa, BK virus
ENVPPVLHVTNTATTV

SEQ ID NO: 28021 - protein, 16 aa, BK virus
NVPPVLHVTNTATTVL

SEQ ID NO: 28022 - protein, 16 aa, BK virus
VPPVLHVTNTATTVLL

SEQ ID NO: 28023 - protein, 16 aa, BK virus
PPVLHVTNTATTVLLD

SEQ ID NO: 28024 - protein, 16 aa, BK virus
PVLHVTNTATTVLLDE

SEQ ID NO: 28025 - protein, 16 aa, BK virus
VLHVTNTATTVLLDEQ

SEQ ID NO: 28026 - protein, 16 aa, BK virus
LHVTNTATTVLLDEQG

SEQ ID NO: 28027 - protein, 16 aa, BK virus
HVTNTATTVLLDEQGV

SEQ ID NO: 28028 - protein, 16 aa, BK virus
VTNTATTVLLDEQGVG

SEQ ID NO: 28029 - protein, 16 aa, BK virus
TNTATTVLLDEQGVGP

SEQ ID NO: 28030 - protein, 16 aa, BK virus
NTATTVLLDEQGVGPL

SEQ ID NO: 28031 - protein, 16 aa, BK virus
TATTVLLDEQGVGPLC

SEQ ID NO: 28032 - protein, 16 aa, BK virus
ATTVLLDEQGVGPLCK

SEQ ID NO: 28033 - protein, 16 aa, BK virus
TTVLLDEQGVGPLCKA

SEQ ID NO: 28034 - protein, 16 aa, BK virus
TVLLDEQGVGPLCKAD

SEQ ID NO: 28035 - protein, 16 aa, BK virus
VLLDEQGVGPLCKADS

SEQ ID NO: 28036 - protein, 16 aa, BK virus
LLDEQGVGPLCKADSL

SEQ ID NO: 28037 - protein, 16 aa, BK virus
LDEQGVGPLCKADSLY

SEQ ID NO: 28038 - protein, 16 aa, BK virus
DEQGVGPLCKADSLYV

SEQ ID NO: 28039 - protein, 16 aa, BK virus
EQGVGPLCKADSLYVS

SEQ ID NO: 28040 - protein, 16 aa, BK virus
QGVGPLCKADSLYVSA

SEQ ID NO: 28041 - protein, 16 aa, BK virus
GVGPLCKADSLYVSAA

SEQ ID NO: 28042 - protein, 16 aa, BK virus
VGPLCKADSLYVSAAD

SEQ ID NO: 28043 - protein, 16 aa, BK virus
GPLCKADSLYVSAADI

SEQ ID NO: 28044 - protein, 16 aa, BK virus
PLCKADSLYVSAADIC

SEQ ID NO: 28045 - protein, 16 aa, BK virus
LCKADSLYVSAADICG

SEQ ID NO: 28046 - protein, 16 aa, BK virus
CKADSLYVSAADICGL

SEQ ID NO: 28047 - protein, 16 aa, BK virus
KADSLYVSAADICGLF

SEQ ID NO: 28048 - protein, 16 aa, BK virus
ADSLYVSAADICGLFT

SEQ ID NO: 28049 - protein, 16 aa, BK virus
DSLYVSAADICGLFTN

SEQ ID NO: 28050 - protein, 16 aa, BK virus
SLYVSAADICGLFTNS

SEQ ID NO: 28051 - protein, 16 aa, BK virus
LYVSAADICGLFTNSS

SEQ ID NO: 28052 - protein, 16 aa, BK virus
YVSAADICGLFTNSSG

SEQ ID NO: 28053 - protein, 16 aa, BK virus
VSAADICGLFTNSSGT

SEQ ID NO: 28054 - protein, 16 aa, BK virus
SAADICGLFTNSSGTQ

SEQ ID NO: 28055 - protein, 16 aa, BK virus
AADICGLFTNSSGTQQ

SEQ ID NO: 28056 - protein, 16 aa, BK virus
ADICGLFTNSSGTQQW

SEQ ID NO: 28057 - protein, 16 aa, BK virus
DICGLFTNSSGTQQWR

SEQ ID NO: 28058 - protein, 16 aa, BK virus
ICGLFTNSSGTQQWRG

SEQ ID NO: 28059 - protein, 16 aa, BK virus
CGLFTNSSGTQQWRGL

SEQ ID NO: 28060 - protein, 16 aa, BK virus
GLFTNSSGTQQWRGLA

SEQ ID NO: 28061 - protein, 16 aa, BK virus
LFTNSSGTQQWRGLAR

SEQ ID NO: 28062 - protein, 16 aa, BK virus
FTNSSGTQQWRGLARY

SEQ ID NO: 28063 - protein, 16 aa, BK virus
TNSSGTQQWRGLARYF

SEQ ID NO: 28064 - protein, 16 aa, BK virus
NSSGTQQWRGLARYFK

SEQ ID NO: 28065 - protein, 16 aa, BK virus
SSGTQQWRGLARYFKI

SEQ ID NO: 28066 - protein, 16 aa, BK virus
SGTQQWRGLARYFKIR

SEQ ID NO: 28067 - protein, 16 aa, BK virus
GTQQWRGLARYFKIRL

SEQ ID NO: 28068 - protein, 16 aa, BK virus
TQQWRGLARYFKIRLR

SEQ ID NO: 28069 - protein, 16 aa, BK virus
QQWRGLARYFKIRLRK

SEQ ID NO: 28070 - protein, 16 aa, BK virus
QWRGLARYFKIRLRKR

SEQ ID NO: 28071 - protein, 16 aa, BK virus
WRGLARYFKIRLRKRS

SEQ ID NO: 28072 - protein, 16 aa, BK virus
RGLARYFKIRLRKRSV

SEQ ID NO: 28073 - protein, 16 aa, BK virus
GLARYFKIRLRKRSVK

SEQ ID NO: 28074 - protein, 16 aa, BK virus
LARYFKIRLRKRSVKN

SEQ ID NO: 28075 - protein, 16 aa, BK virus
ARYFKIRLRKRSVKNP

SEQ ID NO: 28076 - protein, 16 aa, BK virus
RYFKIRLRKRSVKNPY

SEQ ID NO: 28077 - protein, 16 aa, BK virus
YFKIRLRKRSVKNPYP

SEQ ID NO: 28078 - protein, 16 aa, BK virus
FKIRLRKRSVKNPYPI

SEQ ID NO: 28079 - protein, 16 aa, BK virus
KIRLRKRSVKNPYPIS

SEQ ID NO: 28080 - protein, 16 aa, BK virus
IRLRKRSVKNPYPISF

SEQ ID NO: 28081 - protein, 16 aa, BK virus
RLRKRSVKNPYPISFL

SEQ ID NO: 28082 - protein, 16 aa, BK virus
LRKRSVKNPYPISFLL

SEQ ID NO: 28083 - protein, 16 aa, BK virus
RKRSVKNPYPISFLLS

SEQ ID NO: 28084 - protein, 16 aa, BK virus
KRSVKNPYPISFLLSD

SEQ ID NO: 28085 - protein, 16 aa, BK virus
RSVKNPYPISFLLSDL

SEQ ID NO: 28086 - protein, 16 aa, BK virus
SVKNPYPISFLLSDLI

SEQ ID NO: 28087 - protein, 16 aa, BK virus
VKNPYPISFLLSDLIN

SEQ ID NO: 28088 - protein, 16 aa, BK virus
KNPYPISFLLSDLINR

SEQ ID NO: 28089 - protein, 16 aa, BK virus
NPYPISFLLSDLINRR

SEQ ID NO: 28090 - protein, 16 aa, BK virus
PYPISFLLSDLINRRT

SEQ ID NO: 28091 - protein, 16 aa, BK virus
YPISFLLSDLINRRTQ

SEQ ID NO: 28092 - protein, 16 aa, BK virus
PISFLLSDLINRRTQR

SEQ ID NO: 28093 - protein, 16 aa, BK virus
ISFLLSDLINRRTQRV

SEQ ID NO: 28094 - protein, 16 aa, BK virus
SFLLSDLINRRTQRVD

SEQ ID NO: 28095 - protein, 16 aa, BK virus
FLLSDLINRRTQRVDG

SEQ ID NO: 28096 - protein, 16 aa, BK virus
LLSDLINRRTQRVDGQ

SEQ ID NO: 28097 - protein, 16 aa, BK virus
LSDLINRRTQRVDGQP

SEQ ID NO: 28098 - protein, 16 aa, BK virus
SDLINRRTQRVDGQPM

SEQ ID NO: 28099 - protein, 16 aa, BK virus
DLINRRTQRVDGQPMY

SEQ ID NO: 28100 - protein, 16 aa, BK virus
LINRRTQRVDGQPMYG

SEQ ID NO: 28101 - protein, 16 aa, BK virus
INRRTQRVDGQPMYGM

SEQ ID NO: 28102 - protein, 16 aa, BK virus
NRRTQRVDGQPMYGME

SEQ ID NO: 28103 - protein, 16 aa, BK virus
RRTQRVDGQPMYGMES

SEQ ID NO: 28104 - protein, 16 aa, BK virus
RTQRVDGQPMYGMESQ

SEQ ID NO: 28105 - protein, 16 aa, BK virus
TQRVDGQPMYGMESQV

SEQ ID NO: 28106 - protein, 16 aa, BK virus
QRVDGQPMYGMESQVE

SEQ ID NO: 28107 - protein, 16 aa, BK virus
RVDGQPMYGMESQVEE

SEQ ID NO: 28108 - protein, 16 aa, BK virus
VDGQPMYGMESQVEEV

SEQ ID NO: 28109 - protein, 16 aa, BK virus
DGQPMYGMESQVEEVR

SEQ ID NO: 28110 - protein, 16 aa, BK virus
GQPMYGMESQVEEVRV

SEQ ID NO: 28111 - protein, 16 aa, BK virus
QPMYGMESQVEEVRVF

SEQ ID NO: 28112 - protein, 16 aa, BK virus
PMYGMESQVEEVRVFD

SEQ ID NO: 28113 - protein, 16 aa, BK virus
MYGMESQVEEVRVFDG

SEQ ID NO: 28114 - protein, 16 aa, BK virus
YGMESQVEEVRVFDGT

SEQ ID NO: 28115 - protein, 16 aa, BK virus
GMESQVEEVRVFDGTE

SEQ ID NO: 28116 - protein, 16 aa, BK virus
MESQVEEVRVFDGTER

SEQ ID NO: 28117 - protein, 16 aa, BK virus
ESQVEEVRVFDGTERL

SEQ ID NO: 28118 - protein, 16 aa, BK virus
SQVEEVRVFDGTERLP

SEQ ID NO: 28119 - protein, 16 aa, BK virus
QVEEVRVFDGTERLPG

SEQ ID NO: 28120 - protein, 16 aa, BK virus
VEEVRVFDGTERLPGD

SEQ ID NO: 28121 - protein, 16 aa, BK virus
EEVRVFDGTERLPGDP

SEQ ID NO: 28122 - protein, 16 aa, BK virus
EVRVFDGTERLPGDPD

SEQ ID NO: 28123 - protein, 16 aa, BK virus
VRVFDGTERLPGDPDM

SEQ ID NO: 28124 - protein, 16 aa, BK virus
RVFDGTERLPGDPDMI

SEQ ID NO: 28125 - protein, 16 aa, BK virus
VFDGTERLPGDPDMIR

SEQ ID NO: 28126 - protein, 16 aa, BK virus
FDGTERLPGDPDMIRY

SEQ ID NO: 28127 - protein, 16 aa, BK virus
DGTERLPGDPDMIRYI

SEQ ID NO: 28128 - protein, 16 aa, BK virus
GTERLPGDPDMIRYID

SEQ ID NO: 28129 - protein, 16 aa, BK virus
TERLPGDPDMIRYIDK

SEQ ID NO: 28130 - protein, 16 aa, BK virus
ERLPGDPDMIRYIDKQ

SEQ ID NO: 28131 - protein, 16 aa, BK virus
RLPGDPDMIRYIDKQG

SEQ ID NO: 28132 - protein, 16 aa, BK virus
LPGDPDMIRYIDKQGQ

SEQ ID NO: 28133 - protein, 16 aa, BK virus
PGDPDMIRYIDKQGQL

SEQ ID NO: 28134 - protein, 16 aa, BK virus
GDPDMIRYIDKQGQLQ

SEQ ID NO: 28135 - protein, 16 aa, BK virus
DPDMIRYIDKQGQLQT

SEQ ID NO: 28136 - protein, 16 aa, BK virus
PDMIRYIDKQGQLQTK

SEQ ID NO: 28137 - protein, 16 aa, BK virus
DMIRYIDKQGQLQTKM

SEQ ID NO: 28138 - protein, 16 aa, BK virus
MIRYIDKQGQLQTKML

SEQ ID NO: 28139 - protein, 16 aa, BK virus
TGAFIVHIHLINAAFV

SEQ ID NO: 28140 - protein, 16 aa, BK virus
ATFKLVLFWGWCFRPF

SEQ ID NO: 28141 - protein, 16 aa, BK virus
TFKLVLFWGWCFRPFK

SEQ ID NO: 28142 - protein, 16 aa, BK virus
FKLVLFWGWCFRPFKT

SEQ ID NO: 28143 - protein, 16 aa, BK virus
KLVLFWGWCFRPFKTL

SEQ ID NO: 28144 - protein, 16 aa, BK virus
LVLFWGWCFRPFKTLK

SEQ ID NO: 28145 - protein, 16 aa, BK virus
VLFWGWCFRPFKTLKA

SEQ ID NO: 28146 - protein, 16 aa, BK virus
LFWGWCFRPFKTLKAF

SEQ ID NO: 28147 - protein, 16 aa, BK virus
FWGWCFRPFKTLKAFT

SEQ ID NO: 28148 - protein, 16 aa, BK virus
WGWCFRPFKTLKAFTQ

SEQ ID NO: 28149 - protein, 16 aa, BK virus
GWCFRPFKTLKAFTQM

SEQ ID NO: 28150 - protein, 16 aa, BK virus
WCFRPFKTLKAFTQMQ

SEQ ID NO: 28151 - protein, 16 aa, BK virus
CFRPFKTLKAFTQMQL

SEQ ID NO: 28152 - protein, 16 aa, BK virus
FRPFKTLKAFTQMQLL

SEQ ID NO: 28153 - protein, 16 aa, BK virus
RPFKTLKAFTQMQLLT

SEQ ID NO: 28154 - protein, 16 aa, BK virus
PFKTLKAFTQMQLLTM

SEQ ID NO: 28155 - protein, 16 aa, BK virus
FKTLKAFTQMQLLTMG

SEQ ID NO: 28156 - protein, 16 aa, BK virus
KTLKAFTQMQLLTMGV

SEQ ID NO: 28157 - protein, 16 aa, BK virus
ILFSCNIKNTFPHAYI

SEQ ID NO: 28158 - protein, 16 aa, BK virus
LFSCNIKNTFPHAYII

SEQ ID NO: 28159 - protein, 16 aa, BK virus
FSCNIKNTFPHAYIIF

SEQ ID NO: 28160 - protein, 16 aa, BK virus
SCNIKNTFPHAYIIFH

SEQ ID NO: 28161 - protein, 16 aa, BK virus
CNIKNTFPHAYIIFHP

SEQ ID NO: 28162 - protein, 16 aa, BK virus
KSIHTYLRIQPFLPFN

SEQ ID NO: 28163 - protein, 16 aa, BK virus
SIHTYLRIQPFLPFNN

SEQ ID NO: 28164 - protein, 16 aa, BK virus
IHTYLRIQPFLPFNNS

SEQ ID NO: 28165 - protein, 16 aa, BK virus
HTYLRIQPFLPFNNSR

SEQ ID NO: 28166 - protein, 16 aa, BK virus
TYLRIQPFLPFNNSRL

SEQ ID NO: 28167 - protein, 16 aa, BK virus
YLRIQPFLPFNNSRLY

SEQ ID NO: 28168 - protein, 16 aa, BK virus
LRIQPFLPFNNSRLYI

SEQ ID NO: 28169 - protein, 16 aa, BK virus
RIQPFLPFNNSRLYIS

SEQ ID NO: 28170 - protein, 16 aa, BK virus
IQPFLPFNNSRLYISC

SEQ ID NO: 28171 - protein, 16 aa, BK virus
QPFLPFNNSRLYISCK

SEQ ID NO: 28172 - protein, 16 aa, BK virus
PFLPFNNSRLYISCKI

SEQ ID NO: 28173 - protein, 16 aa, BK virus
FLPFNNSRLYISCKIS

SEQ ID NO: 28174 - protein, 16 aa, BK virus
LPFNNSRLYISCKISY

SEQ ID NO: 28175 - protein, 16 aa, BK virus
PFNNSRLYISCKISYR

SEQ ID NO: 28176 - protein, 16 aa, BK virus
FNNSRLYISCKISYRP

SEQ ID NO: 28177 - protein, 16 aa, BK virus
NNSRLYISCKISYRPK

SEQ ID NO: 28178 - protein, 16 aa, BK virus
NSRLYISCKISYRPKP

SEQ ID NO: 28179 - protein, 16 aa, BK virus
SRLYISCKISYRPKPN

SEQ ID NO: 28180 - protein, 16 aa, BK virus
IYFGPKIYLSYKSSLQ

SEQ ID NO: 28181 - protein, 16 aa, BK virus
YFGPKIYLSYKSSLQG

SEQ ID NO: 28182 - protein, 16 aa, BK virus
FGPKIYLSYKSSLQGF

SEQ ID NO: 28183 - protein, 16 aa, BK virus
GPKIYLSYKSSLQGFR

SEQ ID NO: 28184 - protein, 16 aa, BK virus
PKIYLSYKSSLQGFRD

SEQ ID NO: 28185 - protein, 16 aa, BK virus
KIYLSYKSSLQGFRDR

SEQ ID NO: 28186 - protein, 16 aa, BK virus
IYLSYKSSLQGFRDRI

SEQ ID NO: 28187 - protein, 16 aa, BK virus
YLSYKSSLQGFRDRIL

SEQ ID NO: 28188 - protein, 16 aa, BK virus
LSYKSSLQGFRDRILI

SEQ ID NO: 28189 - protein, 16 aa, BK virus
SYKSSLQGFRDRILIH

SEQ ID NO: 28190 - protein, 16 aa, BK virus
YKSSLQGFRDRILIHC

SEQ ID NO: 28191 - protein, 16 aa, BK virus
KSSLQGFRDRILIHCN

SEQ ID NO: 28192 - protein, 16 aa, BK virus
SSLQGFRDRILIHCNQ

SEQ ID NO: 28193 - protein, 16 aa, BK virus
SLQGFRDRILIHCNQA

SEQ ID NO: 28194 - protein, 16 aa, BK virus
LQGFRDRILIHCNQAW

SEQ ID NO: 28195 - protein, 16 aa, BK virus
QGFRDRILIHCNQAWW

SEQ ID NO: 28196 - protein, 16 aa, BK virus
GFRDRILIHCNQAWWK

SEQ ID NO: 28197 - protein, 16 aa, BK virus
FRDRILIHCNQAWWKY

SEQ ID NO: 28198 - protein, 16 aa, BK virus
RDRILIHCNQAWWKYL

SEQ ID NO: 28199 - protein, 16 aa, BK virus
DRILIHCNQAWWKYLG

SEQ ID NO: 28200 - protein, 16 aa, BK virus
RILIHCNQAWWKYLGS

SEQ ID NO: 28201 - protein, 16 aa, BK virus
ILIHCNQAWWKYLGSF

SEQ ID NO: 28202 - protein, 16 aa, BK virus
LIHCNQAWWKYLGSFV

SEQ ID NO: 28203 - protein, 16 aa, BK virus
FSSCPFYIFKNNHVLI

SEQ ID NO: 28204 - protein, 16 aa, BK virus
SSCPFYIFKNNHVLIY

SEQ ID NO: 28205 - protein, 16 aa, BK virus
SCPFYIFKNNHVLIYS

SEQ ID NO: 28206 - protein, 16 aa, BK virus
CPFYIFKNNHVLIYSY

SEQ ID NO: 28207 - protein, 16 aa, BK virus
PFYIFKNNHVLIYSYT

SEQ ID NO: 28208 - protein, 16 aa, BK virus
PVSSFRYIENNTVQKI

SEQ ID NO: 28209 - protein, 16 aa, BK virus
VSSFRYIENNTVQKIK

SEQ ID NO: 28210 - protein, 16 aa, BK virus
SSFRYIENNTVQKIKY

SEQ ID NO: 28211 - protein, 16 aa, BK virus
SFRYIENNTVQKIKYY

SEQ ID NO: 28212 - protein, 16 aa, BK virus
FRYIENNTVQKIKYYR

SEQ ID NO: 28213 - protein, 16 aa, BK virus
RYIENNTVQKIKYYRI

SEQ ID NO: 28214 - protein, 16 aa, BK virus
YIENNTVQKIKYYRIH

SEQ ID NO: 28215 - protein, 16 aa, BK virus
IENNTVQKIKYYRIHF

SEQ ID NO: 28216 - protein, 16 aa, BK virus
ENNTVQKIKYYRIHFR

SEQ ID NO: 28217 - protein, 16 aa, BK virus
NCIYCLLTNTFLIFTF

SEQ ID NO: 28218 - protein, 16 aa, BK virus
CIYCLLTNTFLIFTFC

SEQ ID NO: 28219 - protein, 16 aa, BK virus
IYCLLTNTFLIFTFCK

SEQ ID NO: 28220 - protein, 16 aa, BK virus
YCLLTNTFLIFTFCKN

SEQ ID NO: 28221 - protein, 16 aa, BK virus
CLLTNTFLIFTFCKNN

SEQ ID NO: 28222 - protein, 16 aa, BK virus
LLTNTFLIFTFCKNNS

SEQ ID NO: 28223 - protein, 16 aa, BK virus
LTNTFLIFTFCKNNSI

SEQ ID NO: 28224 - protein, 16 aa, BK virus
TNTFLIFTFCKNNSIC

SEQ ID NO: 28225 - protein, 16 aa, BK virus
NTFLIFTFCKNNSICK

SEQ ID NO: 28226 - protein, 16 aa, BK virus
TFLIFTFCKNNSICKV

SEQ ID NO: 28227 - protein, 16 aa, BK virus
FLIFTFCKNNSICKVL

SEQ ID NO: 28228 - protein, 16 aa, BK virus
LIFTFCKNNSICKVLF

SEQ ID NO: 28229 - protein, 16 aa, BK virus
IFTFCKNNSICKVLFM

SEQ ID NO: 28230 - protein, 16 aa, BK virus
FTFCKNNSICKVLFMI

SEQ ID NO: 28231 - protein, 16 aa, BK virus
TFCKNNSICKVLFMIL

SEQ ID NO: 28232 - protein, 16 aa, BK virus
FCKNNSICKVLFMILK

SEQ ID NO: 28233 - protein, 16 aa, BK virus
CKNNSICKVLFMILKV

SEQ ID NO: 28234 - protein, 16 aa, BK virus
KNNSICKVLFMILKVI

SEQ ID NO: 28235 - protein, 16 aa, BK virus
NNSICKVLFMILKVIR

SEQ ID NO: 28236 - protein, 16 aa, BK virus
NSICKVLFMILKVIRL

SEQ ID NO: 28237 - protein, 16 aa, BK virus
SICKVLFMILKVIRLV

SEQ ID NO: 28238 - protein, 16 aa, BK virus
ICKVLFMILKVIRLVF

SEQ ID NO: 28239 - protein, 16 aa, BK virus
CKVLFMILKVIRLVFF

SEQ ID NO: 28240 - protein, 16 aa, BK virus
KVLFMILKVIRLVFFL

SEQ ID NO: 28241 - protein, 16 aa, BK virus
VLFMILKVIRLVFFLT

SEQ ID NO: 28242 - protein, 16 aa, BK virus
LFMILKVIRLVFFLTL

SEQ ID NO: 28243 - protein, 16 aa, BK virus
FMILKVIRLVFFLTLF

SEQ ID NO: 28244 - protein, 16 aa, BK virus
MILKVIRLVFFLTLFT

SEQ ID NO: 28245 - protein, 16 aa, BK virus
ILKVIRLVFFLTLFTL

SEQ ID NO: 28246 - protein, 16 aa, BK virus
LKVIRLVFFLTLFTLL

SEQ ID NO: 28247 - protein, 16 aa, BK virus
KVIRLVFFLTLFTLLY

SEQ ID NO: 28248 - protein, 16 aa, BK virus
VIRLVFFLTLFTLLYI

SEQ ID NO: 28249 - protein, 16 aa, BK virus
IRLVFFLTLFTLLYIV

SEQ ID NO: 28250 - protein, 16 aa, BK virus
RLVFFLTLFTLLYIVL

SEQ ID NO: 28251 - protein, 16 aa, BK virus
LVFFLTLFTLLYIVLK

SEQ ID NO: 28252 - protein, 16 aa, BK virus
VFFLTLFTLLYIVLKF

SEQ ID NO: 28253 - protein, 16 aa, BK virus
FPRHLLCFFRLFWAKI

SEQ ID NO: 28254 - protein, 16 aa, BK virus
PRHLLCFFRLFWAKIM

SEQ ID NO: 28255 - protein, 16 aa, BK virus
RHLLCFFRLFWAKIML

SEQ ID NO: 28256 - protein, 16 aa, BK virus
HLLCFFRLFWAKIMLL

SEQ ID NO: 28257 - protein, 16 aa, BK virus
KTKGTQLLTEIINCRN

SEQ ID NO: 28258 - protein, 16 aa, BK virus
TKGTQLLTEIINCRNS

SEQ ID NO: 28259 - protein, 16 aa, BK virus
KGTQLLTEIINCRNSM

SEQ ID NO: 28260 - protein, 16 aa, BK virus
GTQLLTEIINCRNSMS

SEQ ID NO: 28261 - protein, 16 aa, BK virus
TQLLTEIINCRNSMSM

SEQ ID NO: 28262 - protein, 16 aa, BK virus
QLLTEIINCRNSMSMW

SEQ ID NO: 28263 - protein, 16 aa, BK virus
LLTEIINCRNSMSMWS

SEQ ID NO: 28264 - protein, 16 aa, BK virus
KEYNIMPSTHVSTNKS

SEQ ID NO: 28265 - protein, 16 aa, BK virus
EYNIMPSTHVSTNKSY

SEQ ID NO: 28266 - protein, 16 aa, BK virus
YNIMPSTHVSTNKSYR

SEQ ID NO: 28267 - protein, 16 aa, BK virus
NIMPSTHVSTNKSYRI

SEQ ID NO: 28268 - protein, 16 aa, BK virus
IMPSTHVSTNKSYRIF

SEQ ID NO: 28269 - protein, 16 aa, BK virus
MPSTHVSTNKSYRIFF

SEQ ID NO: 28270 - protein, 16 aa, BK virus
PSTHVSTNKSYRIFFH

SEQ ID NO: 28271 - protein, 16 aa, BK virus
STHVSTNKSYRIFFHK

SEQ ID NO: 28272 - protein, 16 aa, BK virus
THVSTNKSYRIFFHKF

SEQ ID NO: 28273 - protein, 16 aa, BK virus
HVSTNKSYRIFFHKFF

SEQ ID NO: 28274 - protein, 16 aa, BK virus
VSTNKSYRIFFHKFFI

SEQ ID NO: 28275 - protein, 16 aa, BK virus
STNKSYRIFFHKFFIQ

SEQ ID NO: 28276 - protein, 16 aa, BK virus
TNKSYRIFFHKFFIQN

SEQ ID NO: 28277 - protein, 16 aa, BK virus
NKSYRIFFHKFFIQNL

SEQ ID NO: 28278 - protein, 16 aa, BK virus
KSYRIFFHKFFIQNLS

SEQ ID NO: 28279 - protein, 16 aa, BK virus
SYRIFFHKFFIQNLSF

SEQ ID NO: 28280 - protein, 16 aa, BK virus
YRIFFHKFFIQNLSFF

SEQ ID NO: 28281 - protein, 16 aa, BK virus
RIFFHKFFIQNLSFFF

SEQ ID NO: 28282 - protein, 16 aa, BK virus
IFFHKFFIQNLSFFFS

SEQ ID NO: 28283 - protein, 16 aa, BK virus
FFHKFFIQNLSFFFSS

SEQ ID NO: 28284 - protein, 16 aa, BK virus
FHKFFIQNLSFFFSSI

SEQ ID NO: 28285 - protein, 16 aa, BK virus
HKFFIQNLSFFFSSIH

SEQ ID NO: 28286 - protein, 16 aa, BK virus
KFFIQNLSFFFSSIHS

SEQ ID NO: 28287 - protein, 16 aa, BK virus
FFIQNLSFFFSSIHSK

SEQ ID NO: 28288 - protein, 16 aa, BK virus
FIQNLSFFFSSIHSKA

SEQ ID NO: 28289 - protein, 16 aa, BK virus
IQNLSFFFSSIHSKAG

SEQ ID NO: 28290 - protein, 16 aa, BK virus
QNLSFFFSSIHSKAGK

SEQ ID NO: 28291 - protein, 16 aa, BK virus
NLSFFFSSIHSKAGKG

SEQ ID NO: 28292 - protein, 16 aa, BK virus
LSFFFSSIHSKAGKGS

SEQ ID NO: 28293 - protein, 16 aa, BK virus
SFFFSSIHSKAGKGSI

SEQ ID NO: 28294 - protein, 16 aa, BK virus
FFFSSIHSKAGKGSIT

SEQ ID NO: 28295 - protein, 16 aa, BK virus
FFSSIHSKAGKGSITK

SEQ ID NO: 28296 - protein, 16 aa, BK virus
FSSIHSKAGKGSITKY

SEQ ID NO: 28297 - protein, 16 aa, BK virus
SSIHSKAGKGSITKYS

SEQ ID NO: 28298 - protein, 16 aa, BK virus
SIHSKAGKGSITKYSL

SEQ ID NO: 28299 - protein, 16 aa, BK virus
IHSKAGKGSITKYSLT

SEQ ID NO: 28300 - protein, 16 aa, BK virus
HSKAGKGSITKYSLTK

SEQ ID NO: 28301 - protein, 16 aa, BK virus
SKAGKGSITKYSLTKK

SEQ ID NO: 28302 - protein, 16 aa, BK virus
KAGKGSITKYSLTKKL

SEQ ID NO: 28303 - protein, 16 aa, BK virus
AGKGSITKYSLTKKLV

SEQ ID NO: 28304 - protein, 16 aa, BK virus
IRGKVFRVFYLSFFFG

SEQ ID NO: 28305 - protein, 16 aa, BK virus
RGKVFRVFYLSFFFGW

SEQ ID NO: 28306 - protein, 16 aa, BK virus
GKVFRVFYLSFFFGWC

SEQ ID NO: 28307 - protein, 16 aa, BK virus
VLRICCCFFITGKHIF

SEQ ID NO: 28308 - protein, 16 aa, BK virus
LRICCCFFITGKHIFM

SEQ ID NO: 28309 - protein, 16 aa, BK virus
RICCCFFITGKHIFMA

SEQ ID NO: 28310 - protein, 16 aa, BK virus
ICCCFFITGKHIFMAK

SEQ ID NO: 28311 - protein, 16 aa, BK virus
IFIPFFIKGTPPGLPL

SEQ ID NO: 28312 - protein, 16 aa, BK virus
FIPFFIKGTPPGLPLF

SEQ ID NO: 28313 - protein, 16 aa, BK virus
IPFFIKGTPPGLPLFC

SEQ ID NO: 28314 - protein, 16 aa, BK virus
PFFIKGTPPGLPLFCS

SEQ ID NO: 28315 - protein, 16 aa, BK virus
FFIKGTPPGLPLFCSI

SEQ ID NO: 28316 - protein, 16 aa, BK virus
FIKGTPPGLPLFCSIG

SEQ ID NO: 28317 - protein, 16 aa, BK virus
IKGTPPGLPLFCSIGW

SEQ ID NO: 28318 - protein, 16 aa, BK virus
KGTPPGLPLFCSIGWH

SEQ ID NO: 28319 - protein, 16 aa, BK virus
GTPPGLPLFCSIGWHL

SEQ ID NO: 28320 - protein, 16 aa, BK virus
SFRSLKGVSPIIWTHH

SEQ ID NO: 28321 - protein, 16 aa, BK virus
FRSLKGVSPIIWTHHC

SEQ ID NO: 28322 - protein, 16 aa, BK virus
RSLKGVSPIIWTHHCR

SEQ ID NO: 28323 - protein, 16 aa, BK virus
SLKGVSPIIWTHHCRV

SEQ ID NO: 28324 - protein, 16 aa, BK virus
LKGVSPIIWTHHCRVS

SEQ ID NO: 28325 - protein, 16 aa, BK virus
KGVSPIIWTHHCRVSS

SEQ ID NO: 28326 - protein, 16 aa, BK virus
GVSPIIWTHHCRVSSV

SEQ ID NO: 28327 - protein, 16 aa, BK virus
VSPIIWTHHCRVSSVR

SEQ ID NO: 28328 - protein, 16 aa, BK virus
SPIIWTHHCRVSSVRS

SEQ ID NO: 28329 - protein, 16 aa, BK virus
PIIWTHHCRVSSVRSK

SEQ ID NO: 28330 - protein, 16 aa, BK virus
IIWTHHCRVSSVRSKP

SEQ ID NO: 28331 - protein, 16 aa, BK virus
IWTHHCRVSSVRSKPN

SEQ ID NO: 28332 - protein, 16 aa, BK virus
WTHHCRVSSVRSKPNH

SEQ ID NO: 28333 - protein, 16 aa, BK virus
THHCRVSSVRSKPNHC

SEQ ID NO: 28334 - protein, 16 aa, BK virus
HHCRVSSVRSKPNHCV

SEQ ID NO: 28335 - protein, 16 aa, BK virus
HCRVSSVRSKPNHCVK

SEQ ID NO: 28336 - protein, 16 aa, BK virus
CRVSSVRSKPNHCVKQ

SEQ ID NO: 28337 - protein, 16 aa, BK virus
RVSSVRSKPNHCVKQS

SEQ ID NO: 28338 - protein, 16 aa, BK virus
VSSVRSKPNHCVKQSM

SEQ ID NO: 28339 - protein, 16 aa, BK virus
SSVRSKPNHCVKQSMQ

SEQ ID NO: 28340 - protein, 16 aa, BK virus
QSIQTKGSFLKNFLFK

SEQ ID NO: 28341 - protein, 16 aa, BK virus
SIQTKGSFLKNFLFKC

SEQ ID NO: 28342 - protein, 16 aa, BK virus
IQTKGSFLKNFLFKCL

SEQ ID NO: 28343 - protein, 16 aa, BK virus
QTKGSFLKNFLFKCLN

SEQ ID NO: 28344 - protein, 16 aa, BK virus
TKGSFLKNFLFKCLNL

SEQ ID NO: 28345 - protein, 16 aa, BK virus
KGSFLKNFLFKCLNLS

SEQ ID NO: 28346 - protein, 16 aa, BK virus
HSMQGQCTEGFLEQIG

SEQ ID NO: 28347 - protein, 16 aa, BK virus
SMQGQCTEGFLEQIGH

SEQ ID NO: 28348 - protein, 16 aa, BK virus
MQGQCTEGFLEQIGHS

SEQ ID NO: 28349 - protein, 16 aa, BK virus
QGQCTEGFLEQIGHSL

SEQ ID NO: 28350 - protein, 16 aa, BK virus
GQCTEGFLEQIGHSLQ

SEQ ID NO: 28351 - protein, 16 aa, BK virus
QCTEGFLEQIGHSLQY

SEQ ID NO: 28352 - protein, 16 aa, BK virus
CTEGFLEQIGHSLQYR

SEQ ID NO: 28353 - protein, 16 aa, BK virus
TEGFLEQIGHSLQYRV

SEQ ID NO: 28354 - protein, 16 aa, BK virus
EGFLEQIGHSLQYRVS

SEQ ID NO: 28355 - protein, 16 aa, BK virus
GFLEQIGHSLQYRVSG

SEQ ID NO: 28356 - protein, 16 aa, BK virus
FLEQIGHSLQYRVSGQ

SEQ ID NO: 28357 - protein, 16 aa, BK virus
LEQIGHSLQYRVSGQR

SEQ ID NO: 28358 - protein, 16 aa, BK virus
EQIGHSLQYRVSGQRG

SEQ ID NO: 28359 - protein, 16 aa, BK virus
QIGHSLQYRVSGQRGK

SEQ ID NO: 28360 - protein, 16 aa, BK virus
IGHSLQYRVSGQRGKS

SEQ ID NO: 28361 - protein, 16 aa, BK virus
GHSLQYRVSGQRGKSA

SEQ ID NO: 28362 - protein, 16 aa, BK virus
HSLQYRVSGQRGKSAQ

SEQ ID NO: 28363 - protein, 16 aa, BK virus
SLQYRVSGQRGKSAQT

SEQ ID NO: 28364 - protein, 16 aa, BK virus
LQYRVSGQRGKSAQTS

SEQ ID NO: 28365 - protein, 16 aa, BK virus
QYRVSGQRGKSAQTSE

SEQ ID NO: 28366 - protein, 16 aa, BK virus
YRVSGQRGKSAQTSEL

SEQ ID NO: 28367 - protein, 16 aa, BK virus
RVSGQRGKSAQTSELL

SEQ ID NO: 28368 - protein, 16 aa, BK virus
VSGQRGKSAQTSELLQ

SEQ ID NO: 28369 - protein, 16 aa, BK virus
SGQRGKSAQTSELLQV

SEQ ID NO: 28370 - protein, 16 aa, BK virus
GQRGKSAQTSELLQVP

SEQ ID NO: 28371 - protein, 16 aa, BK virus
QRGKSAQTSELLQVPK

SEQ ID NO: 28372 - protein, 16 aa, BK virus
RGKSAQTSELLQVPKS

SEQ ID NO: 28373 - protein, 16 aa, BK virus
GKSAQTSELLQVPKSG

SEQ ID NO: 28374 - protein, 16 aa, BK virus
ATFTSCSIFLYKVFIL

SEQ ID NO: 28375 - protein, 16 aa, BK virus
TFTSCSIFLYKVFILF

SEQ ID NO: 28376 - protein, 16 aa, BK virus
FTSCSIFLYKVFILFI

SEQ ID NO: 28377 - protein, 16 aa, BK virus
TSCSIFLYKVFILFIL

SEQ ID NO: 28378 - protein, 16 aa, BK virus
SCSIFLYKVFILFILS

SEQ ID NO: 28379 - protein, 16 aa, BK virus
CSIFLYKVFILFILSS

SEQ ID NO: 28380 - protein, 16 aa, BK virus
SIFLYKVFILFILSSS

SEQ ID NO: 28381 - protein, 16 aa, BK virus
IFLYKVFILFILSSSP

SEQ ID NO: 28382 - protein, 16 aa, BK virus
FLYKVFILFILSSSPP

SEQ ID NO: 28383 - protein, 16 aa, BK virus
LYKVFILFILSSSPPL

SEQ ID NO: 28384 - protein, 16 aa, BK virus
YKVFILFILSSSPPLS

SEQ ID NO: 28385 - protein, 16 aa, BK virus
KVFILFILSSSPPLSG

SEQ ID NO: 28386 - protein, 16 aa, BK virus
AFLIKGRFPQAALSRP

SEQ ID NO: 28387 - protein, 16 aa, BK virus
FLIKGRFPQAALSRPK

SEQ ID NO: 28388 - protein, 16 aa, BK virus
LIKGRFPQAALSRPKR

SEQ ID NO: 28389 - protein, 16 aa, BK virus
IKGRFPQAALSRPKRS

SEQ ID NO: 28390 - protein, 16 aa, BK virus
KGRFPQAALSRPKRSM

SEQ ID NO: 28391 - protein, 16 aa, BK virus
GRFPQAALSRPKRSMS

SEQ ID NO: 28392 - protein, 16 aa, BK virus
RFPQAALSRPKRSMSS

SEQ ID NO: 28393 - protein, 16 aa, BK virus
FPQAALSRPKRSMSSM

SEQ ID NO: 28394 - protein, 16 aa, BK virus
PQAALSRPKRSMSSMD

SEQ ID NO: 28395 - protein, 16 aa, BK virus
QAALSRPKRSMSSMDS

SEQ ID NO: 28396 - protein, 16 aa, BK virus
AALSRPKRSMSSMDSS

SEQ ID NO: 28397 - protein, 16 aa, BK virus
ALSRPKRSMSSMDSSL

SEQ ID NO: 28398 - protein, 16 aa, BK virus
LSRPKRSMSSMDSSLL

SEQ ID NO: 28399 - protein, 16 aa, BK virus
SRPKRSMSSMDSSLLR

SEQ ID NO: 28400 - protein, 16 aa, BK virus
RPKRSMSSMDSSLLRT

SEQ ID NO: 28401 - protein, 16 aa, BK virus
PKRSMSSMDSSLLRTL

SEQ ID NO: 28402 - protein, 16 aa, BK virus
KRSMSSMDSSLLRTLS

SEQ ID NO: 28403 - protein, 13 aa, BK virus
GFPQIVLLGLRKS

SEQ ID NO: 28404 - protein, 13 aa, BK virus
FPQIVLLGLRKSL

SEQ ID NO: 28405 - protein, 13 aa, BK virus
PQIVLLGLRKSLH

SEQ ID NO: 28406 - protein, 13 aa, BK virus
QIVLLGLRKSLHT

SEQ ID NO: 28407 - protein, 13 aa, BK virus
IVLLGLRKSLHTL

SEQ ID NO: 28408 - protein, 13 aa, BK virus
VLLGLRKSLHTLT

SEQ ID NO: 28409 - protein, 13 aa, BK virus
LLGLRKSLHTLTT

SEQ ID NO: 28410 - protein, 13 aa, BK virus
EKGWRQRRPRPLI

SEQ ID NO: 28411 - protein, 13 aa, BK virus
KGWRQRRPRPLIY

SEQ ID NO: 28412 - protein, 13 aa, BK virus
GWRQRRPRPLIYY

SEQ ID NO: 28413 - protein, 13 aa, BK virus
WRQRRPRPLIYYK

SEQ ID NO: 28414 - protein, 13 aa, BK virus
RQRRPRPLIYYKK

SEQ ID NO: 28415 - protein, 13 aa, BK virus
QRRPRPLIYYKKK

SEQ ID NO: 28416 - protein, 13 aa, BK virus
RRPRPLIYYKKKG

SEQ ID NO: 28417 - protein, 13 aa, BK virus
RPRPLIYYKKKGH

SEQ ID NO: 28418 - protein, 13 aa, BK virus
PRPLIYYKKKGHR

SEQ ID NO: 28419 - protein, 13 aa, BK virus
RPLIYYKKKGHRE

SEQ ID NO: 28420 - protein, 13 aa, BK virus
PLIYYKKKGHREE

SEQ ID NO: 28421 - protein, 13 aa, BK virus
LIYYKKKGHREEL

SEQ ID NO: 28422 - protein, 13 aa, BK virus
IYYKKKGHREELL

SEQ ID NO: 28423 - protein, 13 aa, BK virus
YYKKKGHREELLT

SEQ ID NO: 28424 - protein, 13 aa, BK virus
YKKKGHREELLTH

SEQ ID NO: 28425 - protein, 13 aa, BK virus
KKKGHREELLTHG

SEQ ID NO: 28426 - protein, 13 aa, BK virus
KKGHREELLTHGM

SEQ ID NO: 28427 - protein, 13 aa, BK virus
KGHREELLTHGMQ

SEQ ID NO: 28428 - protein, 13 aa, BK virus
GHREELLTHGMQP

SEQ ID NO: 28429 - protein, 13 aa, BK virus
HREELLTHGMQPN

SEQ ID NO: 28430 - protein, 13 aa, BK virus
REELLTHGMQPNH

SEQ ID NO: 28431 - protein, 13 aa, BK virus
EELLTHGMQPNHD

SEQ ID NO: 28432 - protein, 13 aa, BK virus
ELLTHGMQPNHDL

SEQ ID NO: 28433 - protein, 13 aa, BK virus
LLTHGMQPNHDLR

SEQ ID NO: 28434 - protein, 13 aa, BK virus
LTHGMQPNHDLRK

SEQ ID NO: 28435 - protein, 13 aa, BK virus
THGMQPNHDLRKE

SEQ ID NO: 28436 - protein, 13 aa, BK virus
HGMQPNHDLRKES

SEQ ID NO: 28437 - protein, 13 aa, BK virus
GMQPNHDLRKESA

SEQ ID NO: 28438 - protein, 13 aa, BK virus
LTGECSQTMTSGR

SEQ ID NO: 28439 - protein, 13 aa, BK virus
TGECSQTMTSGRK

SEQ ID NO: 28440 - protein, 13 aa, BK virus
GECSQTMTSGRKV

SEQ ID NO: 28441 - protein, 13 aa, BK virus
ECSQTMTSGRKVH

SEQ ID NO: 28442 - protein, 13 aa, BK virus
CSQTMTSGRKVHD

SEQ ID NO: 28443 - protein, 13 aa, BK virus
SQTMTSGRKVHDS

SEQ ID NO: 28444 - protein, 13 aa, BK virus
QTMTSGRKVHDSQ

SEQ ID NO: 28445 - protein, 13 aa, BK virus
TMTSGRKVHDSQG

SEQ ID NO: 28446 - protein, 13 aa, BK virus
MTSGRKVHDSQGG

SEQ ID NO: 28447 - protein, 13 aa, BK virus
TSGRKVHDSQGGA

SEQ ID NO: 28448 - protein, 13 aa, BK virus
SGRKVHDSQGGAA

SEQ ID NO: 28449 - protein, 13 aa, BK virus
GRKVHDSQGGAAY

SEQ ID NO: 28450 - protein, 13 aa, BK virus
RKVHDSQGGAAYP

SEQ ID NO: 28451 - protein, 13 aa, BK virus
KVHDSQGGAAYPW

SEQ ID NO: 28452 - protein, 13 aa, BK virus
VHDSQGGAAYPWN

SEQ ID NO: 28453 - protein, 13 aa, BK virus
HDSQGGAAYPWNA

SEQ ID NO: 28454 - protein, 13 aa, BK virus
DSQGGAAYPWNAA

SEQ ID NO: 28455 - protein, 13 aa, BK virus
SQGGAAYPWNAAK

SEQ ID NO: 28456 - protein, 13 aa, BK virus
QGGAAYPWNAAKP

SEQ ID NO: 28457 - protein, 13 aa, BK virus
PQEGKCMTDMFCE

SEQ ID NO: 28458 - protein, 13 aa, BK virus
QEGKCMTDMFCEP

SEQ ID NO: 28459 - protein, 13 aa, BK virus
EGKCMTDMFCEPR

SEQ ID NO: 28460 - protein, 13 aa, BK virus
GKCMTDMFCEPRN

SEQ ID NO: 28461 - protein, 13 aa, BK virus
KCMTDMFCEPRNL

SEQ ID NO: 28462 - protein, 13 aa, BK virus
CMTDMFCEPRNLG

SEQ ID NO: 28463 - protein, 13 aa, BK virus
MTDMFCEPRNLGL

SEQ ID NO: 28464 - protein, 13 aa, BK virus
TDMFCEPRNLGLV

SEQ ID NO: 28465 - protein, 13 aa, BK virus
DMFCEPRNLGLVP

SEQ ID NO: 28466 - protein, 13 aa, BK virus
MFCEPRNLGLVPS

SEQ ID NO: 28467 - protein, 13 aa, BK virus
TGQRPWFCASCHD

SEQ ID NO: 28468 - protein, 13 aa, BK virus
GQRPWFCASCHDK

SEQ ID NO: 28469 - protein, 13 aa, BK virus
QRPWFCASCHDKL

SEQ ID NO: 28470 - protein, 13 aa, BK virus
RPWFCASCHDKLQ

SEQ ID NO: 28471 - protein, 13 aa, BK virus
KLVKPGLEQKKEL

SEQ ID NO: 28472 - protein, 13 aa, BK virus
LVKPGLEQKKELR

SEQ ID NO: 28473 - protein, 13 aa, BK virus
VKPGLEQKKELRG

SEQ ID NO: 28474 - protein, 13 aa, BK virus
KPGLEQKKELRGF

SEQ ID NO: 28475 - protein, 13 aa, BK virus
PGLEQKKELRGFL

SEQ ID NO: 28476 - protein, 13 aa, BK virus
GLEQKKELRGFLF

SEQ ID NO: 28477 - protein, 13 aa, BK virus
LEQKKELRGFLFL

SEQ ID NO: 28478 - protein, 13 aa, BK virus
EQKKELRGFLFLF

SEQ ID NO: 28479 - protein, 13 aa, BK virus
VIPFFLYFQVHGC

SEQ ID NO: 28480 - protein, 13 aa, BK virus
IPFFLYFQVHGCC

SEQ ID NO: 28481 - protein, 13 aa, BK virus
PFFLYFQVHGCCS

SEQ ID NO: 28482 - protein, 13 aa, BK virus
FFLYFQVHGCCSS

SEQ ID NO: 28483 - protein, 13 aa, BK virus
FLYFQVHGCCSST

SEQ ID NO: 28484 - protein, 13 aa, BK virus
LYFQVHGCCSSTF

SEQ ID NO: 28485 - protein, 13 aa, BK virus
YFQVHGCCSSTFG

SEQ ID NO: 28486 - protein, 13 aa, BK virus
FQVHGCCSSTFGG

SEQ ID NO: 28487 - protein, 13 aa, BK virus
QVHGCCSSTFGGP

SEQ ID NO: 28488 - protein, 13 aa, BK virus
VHGCCSSTFGGPS

SEQ ID NO: 28489 - protein, 13 aa, BK virus
HGCCSSTFGGPSC

SEQ ID NO: 28490 - protein, 13 aa, BK virus
GCCSSTFGGPSCQ

SEQ ID NO: 28491 - protein, 13 aa, BK virus
CCSSTFGGPSCQC

SEQ ID NO: 28492 - protein, 13 aa, BK virus
CSSTFGGPSCQCI

SEQ ID NO: 28493 - protein, 13 aa, BK virus
NCCWGGCCCYRSS

SEQ ID NO: 28494 - protein, 13 aa, BK virus
CCWGGCCCYRSSN

SEQ ID NO: 28495 - protein, 13 aa, BK virus
CWGGCCCYRSSNC

SEQ ID NO: 28496 - protein, 13 aa, BK virus
WGGCCCYRSSNCI

SEQ ID NO: 28497 - protein, 13 aa, BK virus
GGCCCYRSSNCIP

SEQ ID NO: 28498 - protein, 13 aa, BK virus
GCCCYRSSNCIPC

SEQ ID NO: 28499 - protein, 13 aa, BK virus
CCCYRSSNCIPCY

SEQ ID NO: 28500 - protein, 13 aa, BK virus
CCYRSSNCIPCYC

SEQ ID NO: 28501 - protein, 13 aa, BK virus
CYRSSNCIPCYCR

SEQ ID NO: 28502 - protein, 13 aa, BK virus
YRSSNCIPCYCRG

SEQ ID NO: 28503 - protein, 13 aa, BK virus
RSSNCIPCYCRGH

SEQ ID NO: 28504 - protein, 13 aa, BK virus
SSNCIPCYCRGHN

SEQ ID NO: 28505 - protein, 13 aa, BK virus
SNCIPCYCRGHNK

SEQ ID NO: 28506 - protein, 13 aa, BK virus
NCIPCYCRGHNKY

SEQ ID NO: 28507 - protein, 13 aa, BK virus
CIPCYCRGHNKYL

SEQ ID NO: 28508 - protein, 13 aa, BK virus
IPCYCRGHNKYLR

SEQ ID NO: 28509 - protein, 13 aa, BK virus
PCYCRGHNKYLRG

SEQ ID NO: 28510 - protein, 13 aa, BK virus
CYCRGHNKYLRGY

SEQ ID NO: 28511 - protein, 13 aa, BK virus
YCRGHNKYLRGYS

SEQ ID NO: 28512 - protein, 13 aa, BK virus
CRGHNKYLRGYSC

SEQ ID NO: 28513 - protein, 13 aa, BK virus
RGHNKYLRGYSCY

SEQ ID NO: 28514 - protein, 13 aa, BK virus
GHNKYLRGYSCYR

SEQ ID NO: 28515 - protein, 13 aa, BK virus
HNKYLRGYSCYRP

SEQ ID NO: 28516 - protein, 13 aa, BK virus
NKYLRGYSCYRPN

SEQ ID NO: 28517 - protein, 13 aa, BK virus
KYLRGYSCYRPNS

SEQ ID NO: 28518 - protein, 13 aa, BK virus
YLRGYSCYRPNSS

SEQ ID NO: 28519 - protein, 13 aa, BK virus
LRGYSCYRPNSSN

SEQ ID NO: 28520 - protein, 13 aa, BK virus
RGYSCYRPNSSNI

SEQ ID NO: 28521 - protein, 13 aa, BK virus
GYSCYRPNSSNIC

SEQ ID NO: 28522 - protein, 13 aa, BK virus
YSCYRPNSSNICC

SEQ ID NO: 28523 - protein, 13 aa, BK virus
SCYRPNSSNICCN

SEQ ID NO: 28524 - protein, 13 aa, BK virus
CYRPNSSNICCNC

SEQ ID NO: 28525 - protein, 13 aa, BK virus
YRPNSSNICCNCW

SEQ ID NO: 28526 - protein, 13 aa, BK virus
RPNSSNICCNCWC

SEQ ID NO: 28527 - protein, 13 aa, BK virus
PNSSNICCNCWCS

SEQ ID NO: 28528 - protein, 13 aa, BK virus
NSSNICCNCWCSW

SEQ ID NO: 28529 - protein, 13 aa, BK virus
SSNICCNCWCSWG

SEQ ID NO: 28530 - protein, 13 aa, BK virus
SNICCNCWCSWGY

SEQ ID NO: 28531 - protein, 13 aa, BK virus
NICCNCWCSWGYC

SEQ ID NO: 28532 - protein, 13 aa, BK virus
ICCNCWCSWGYCW

SEQ ID NO: 28533 - protein, 13 aa, BK virus
CCNCWCSWGYCWV

SEQ ID NO: 28534 - protein, 13 aa, BK virus
CNCWCSWGYCWVC

SEQ ID NO: 28535 - protein, 13 aa, BK virus
NCWCSWGYCWVCC

SEQ ID NO: 28536 - protein, 13 aa, BK virus
CWCSWGYCWVCCF

SEQ ID NO: 28537 - protein, 13 aa, BK virus
WCSWGYCWVCCFN

SEQ ID NO: 28538 - protein, 13 aa, BK virus
CSWGYCWVCCFNS

SEQ ID NO: 28539 - protein, 13 aa, BK virus
SWGYCWVCCFNSN

SEQ ID NO: 28540 - protein, 13 aa, BK virus
WGYCWVCCFNSNC

SEQ ID NO: 28541 - protein, 13 aa, BK virus
LGSQSFHCRPLSA

SEQ ID NO: 28542 - protein, 13 aa, BK virus
GSQSFHCRPLSAI

SEQ ID NO: 28543 - protein, 13 aa, BK virus
SQSFHCRPLSAIR

SEQ ID NO: 28544 - protein, 13 aa, BK virus
QSFHCRPLSAIRH

SEQ ID NO: 28545 - protein, 13 aa, BK virus
SFHCRPLSAIRHG

SEQ ID NO: 28546 - protein, 13 aa, BK virus
FHCRPLSAIRHGF

SEQ ID NO: 28547 - protein, 13 aa, BK virus
HCRPLSAIRHGFG

SEQ ID NO: 28548 - protein, 13 aa, BK virus
CRPLSAIRHGFGI

SEQ ID NO: 28549 - protein, 13 aa, BK virus
RPLSAIRHGFGIV

SEQ ID NO: 28550 - protein, 13 aa, BK virus
ALGSFFVCYYFPG

SEQ ID NO: 28551 - protein, 13 aa, BK virus
LGSFFVCYYFPGF

SEQ ID NO: 28552 - protein, 13 aa, BK virus
GSFFVCYYFPGFV

SEQ ID NO: 28553 - protein, 13 aa, BK virus
SFFVCYYFPGFVA

SEQ ID NO: 28554 - protein, 13 aa, BK virus
FFVCYYFPGFVAC

SEQ ID NO: 28555 - protein, 13 aa, BK virus
FVCYYFPGFVACY

SEQ ID NO: 28556 - protein, 13 aa, BK virus
YTFYNLTGIAEKN

SEQ ID NO: 28557 - protein, 13 aa, BK virus
TFYNLTGIAEKNR

SEQ ID NO: 28558 - protein, 13 aa, BK virus
FYNLTGIAEKNRK

SEQ ID NO: 28559 - protein, 13 aa, BK virus
YNLTGIAEKNRKI

SEQ ID NO: 28560 - protein, 13 aa, BK virus
NLTGIAEKNRKIF

SEQ ID NO: 28561 - protein, 13 aa, BK virus
IFGGNYLDNCKCP

SEQ ID NO: 28562 - protein, 13 aa, BK virus
FGGNYLDNCKCPY

SEQ ID NO: 28563 - protein, 13 aa, BK virus
GGNYLDNCKCPYK

SEQ ID NO: 28564 - protein, 13 aa, BK virus
GNYLDNCKCPYKL

SEQ ID NO: 28565 - protein, 13 aa, BK virus
NYLDNCKCPYKLL

SEQ ID NO: 28566 - protein, 13 aa, BK virus
QYRRSYTKNGLKK

SEQ ID NO: 28567 - protein, 13 aa, BK virus
YRRSYTKNGLKKS

SEQ ID NO: 28568 - protein, 13 aa, BK virus
RRSYTKNGLKKST

SEQ ID NO: 28569 - protein, 13 aa, BK virus
RSYTKNGLKKSTK

SEQ ID NO: 28570 - protein, 13 aa, BK virus
SYTKNGLKKSTKC

SEQ ID NO: 28571 - protein, 13 aa, BK virus
YTKNGLKKSTKCT

SEQ ID NO: 28572 - protein, 13 aa, BK virus
TKNGLKKSTKCTF

SEQ ID NO: 28573 - protein, 13 aa, BK virus
KNGLKKSTKCTFR

SEQ ID NO: 28574 - protein, 13 aa, BK virus
NGLKKSTKCTFRR

SEQ ID NO: 28575 - protein, 13 aa, BK virus
GLKKSTKCTFRRV

SEQ ID NO: 28576 - protein, 13 aa, BK virus
LKKSTKCTFRRVY

SEQ ID NO: 28577 - protein, 13 aa, BK virus
KKSTKCTFRRVYR

SEQ ID NO: 28578 - protein, 13 aa, BK virus
KSTKCTFRRVYRK

SEQ ID NO: 28579 - protein, 13 aa, BK virus
STKCTFRRVYRKN

SEQ ID NO: 28580 - protein, 13 aa, BK virus
TKCTFRRVYRKNY

SEQ ID NO: 28581 - protein, 13 aa, BK virus
KCTFRRVYRKNYC

SEQ ID NO: 28582 - protein, 13 aa, BK virus
CTFRRVYRKNYCP

SEQ ID NO: 28583 - protein, 13 aa, BK virus
TFRRVYRKNYCPR

SEQ ID NO: 28584 - protein, 13 aa, BK virus
FRRVYRKNYCPRR

SEQ ID NO: 28585 - protein, 13 aa, BK virus
RRVYRKNYCPRRC

SEQ ID NO: 28586 - protein, 13 aa, BK virus
SKNCSSMDVAFTS

SEQ ID NO: 28587 - protein, 13 aa, BK virus
KNCSSMDVAFTSR

SEQ ID NO: 28588 - protein, 13 aa, BK virus
NCSSMDVAFTSRP

SEQ ID NO: 28589 - protein, 13 aa, BK virus
CSSMDVAFTSRPV

SEQ ID NO: 28590 - protein, 13 aa, BK virus
SSMDVAFTSRPVR

SEQ ID NO: 28591 - protein, 13 aa, BK virus
SMDVAFTSRPVRD

SEQ ID NO: 28592 - protein, 13 aa, BK virus
MDVAFTSRPVRDC

SEQ ID NO: 28593 - protein, 13 aa, BK virus
DVAFTSRPVRDCN

SEQ ID NO: 28594 - protein, 13 aa, BK virus
VAFTSRPVRDCNT

SEQ ID NO: 28595 - protein, 13 aa, BK virus
AFTSRPVRDCNTC

SEQ ID NO: 28596 - protein, 13 aa, BK virus
FTSRPVRDCNTCS

SEQ ID NO: 28597 - protein, 13 aa, BK virus
RWPQPKEKESVQG

SEQ ID NO: 28598 - protein, 13 aa, BK virus
WPQPKEKESVQGQ

SEQ ID NO: 28599 - protein, 13 aa, BK virus
PQPKEKESVQGQL

SEQ ID NO: 28600 - protein, 13 aa, BK virus
QPKEKESVQGQLP

SEQ ID NO: 28601 - protein, 13 aa, BK virus
PKEKESVQGQLPK

SEQ ID NO: 28602 - protein, 13 aa, BK virus
KEKESVQGQLPKS

SEQ ID NO: 28603 - protein, 13 aa, BK virus
EKESVQGQLPKSQ

SEQ ID NO: 28604 - protein, 13 aa, BK virus
KESVQGQLPKSQR

SEQ ID NO: 28605 - protein, 13 aa, BK virus
ESVQGQLPKSQRN

SEQ ID NO: 28606 - protein, 13 aa, BK virus
SVQGQLPKSQRNP

SEQ ID NO: 28607 - protein, 13 aa, BK virus
VQGQLPKSQRNPC

SEQ ID NO: 28608 - protein, 13 aa, BK virus
QGQLPKSQRNPCK

SEQ ID NO: 28609 - protein, 13 aa, BK virus
GQLPKSQRNPCKC

SEQ ID NO: 28610 - protein, 13 aa, BK virus
QLPKSQRNPCKCQ

SEQ ID NO: 28611 - protein, 13 aa, BK virus
LPKSQRNPCKCQN

SEQ ID NO: 28612 - protein, 13 aa, BK virus
PKSQRNPCKCQNY

SEQ ID NO: 28613 - protein, 13 aa, BK virus
TQKWGIQMKTLGA

SEQ ID NO: 28614 - protein, 13 aa, BK virus
QKWGIQMKTLGAL

SEQ ID NO: 28615 - protein, 13 aa, BK virus
KWGIQMKTLGALV

SEQ ID NO: 28616 - protein, 13 aa, BK virus
VLKMTLAVIAQRE

SEQ ID NO: 28617 - protein, 13 aa, BK virus
LKMTLAVIAQREK

SEQ ID NO: 28618 - protein, 13 aa, BK virus
KMTLAVIAQREKC

SEQ ID NO: 28619 - protein, 13 aa, BK virus
MTLAVIAQREKCF

SEQ ID NO: 28620 - protein, 13 aa, BK virus
TLAVIAQREKCFP

SEQ ID NO: 28621 - protein, 13 aa, BK virus
LAVIAQREKCFPV

SEQ ID NO: 28622 - protein, 13 aa, BK virus
AVIAQREKCFPVT

SEQ ID NO: 28623 - protein, 13 aa, BK virus
VIAQREKCFPVTA

SEQ ID NO: 28624 - protein, 13 aa, BK virus
IAQREKCFPVTAQ

SEQ ID NO: 28625 - protein, 13 aa, BK virus
AQREKCFPVTAQQ

SEQ ID NO: 28626 - protein, 13 aa, BK virus
QREKCFPVTAQQE

SEQ ID NO: 28627 - protein, 13 aa, BK virus
REKCFPVTAQQEF

SEQ ID NO: 28628 - protein, 13 aa, BK virus
EKCFPVTAQQEFP

SEQ ID NO: 28629 - protein, 13 aa, BK virus
KCFPVTAQQEFPS

SEQ ID NO: 28630 - protein, 13 aa, BK virus
CFPVTAQQEFPSP

SEQ ID NO: 28631 - protein, 13 aa, BK virus
FPVTAQQEFPSPI

SEQ ID NO: 28632 - protein, 13 aa, BK virus
LACLTFMQGHKKC

SEQ ID NO: 28633 - protein, 13 aa, BK virus
ACLTFMQGHKKCM

SEQ ID NO: 28634 - protein, 13 aa, BK virus
CLTFMQGHKKCMS

SEQ ID NO: 28635 - protein, 13 aa, BK virus
LTFMQGHKKCMSM

SEQ ID NO: 28636 - protein, 13 aa, BK virus
TFMQGHKKCMSMV

SEQ ID NO: 28637 - protein, 13 aa, BK virus
FMQGHKKCMSMVE

SEQ ID NO: 28638 - protein, 13 aa, BK virus
MQGHKKCMSMVEE

SEQ ID NO: 28639 - protein, 13 aa, BK virus
QGHKKCMSMVEEN

SEQ ID NO: 28640 - protein, 13 aa, BK virus
GHKKCMSMVEENL

SEQ ID NO: 28641 - protein, 13 aa, BK virus
HKKCMSMVEENLF

SEQ ID NO: 28642 - protein, 13 aa, BK virus
KKCMSMVEENLFK

SEQ ID NO: 28643 - protein, 13 aa, BK virus
KCMSMVEENLFKA

SEQ ID NO: 28644 - protein, 13 aa, BK virus
CMSMVEENLFKAV

SEQ ID NO: 28645 - protein, 13 aa, BK virus
MSMVEENLFKAVI

SEQ ID NO: 28646 - protein, 13 aa, BK virus
SMVEENLFKAVIS

SEQ ID NO: 28647 - protein, 13 aa, BK virus
MVEENLFKAVIST

SEQ ID NO: 28648 - protein, 13 aa, BK virus
VEENLFKAVISTS

SEQ ID NO: 28649 - protein, 13 aa, BK virus
EENLFKAVISTSL

SEQ ID NO: 28650 - protein, 13 aa, BK virus
ENLFKAVISTSLL

SEQ ID NO: 28651 - protein, 13 aa, BK virus
ILTIRPIWTKTML

SEQ ID NO: 28652 - protein, 13 aa, BK virus
LTIRPIWTKTMLI

SEQ ID NO: 28653 - protein, 13 aa, BK virus
TIRPIWTKTMLIQ

SEQ ID NO: 28654 - protein, 13 aa, BK virus
IRPIWTKTMLIQL

SEQ ID NO: 28655 - protein, 13 aa, BK virus
RPIWTKTMLIQLS

SEQ ID NO: 28656 - protein, 13 aa, BK virus
PIWTKTMLIQLSA

SEQ ID NO: 28657 - protein, 13 aa, BK virus
IWTKTMLIQLSAG

SEQ ID NO: 28658 - protein, 13 aa, BK virus
WTKTMLIQLSAGY

SEQ ID NO: 28659 - protein, 13 aa, BK virus
TKTMLIQLSAGYL

SEQ ID NO: 28660 - protein, 13 aa, BK virus
KTMLIQLSAGYLI

SEQ ID NO: 28661 - protein, 13 aa, BK virus
TMLIQLSAGYLIP

SEQ ID NO: 28662 - protein, 13 aa, BK virus
MLIQLSAGYLIPV

SEQ ID NO: 28663 - protein, 13 aa, BK virus
LIQLSAGYLIPVE

SEQ ID NO: 28664 - protein, 13 aa, BK virus
IQLSAGYLIPVEM

SEQ ID NO: 28665 - protein, 13 aa, BK virus
QLSAGYLIPVEMK

SEQ ID NO: 28666 - protein, 13 aa, BK virus
LSAGYLIPVEMKM

SEQ ID NO: 28667 - protein, 13 aa, BK virus
SAGYLIPVEMKML

SEQ ID NO: 28668 - protein, 13 aa, BK virus
AGYLIPVEMKMLG

SEQ ID NO: 28669 - protein, 13 aa, BK virus
GYLIPVEMKMLGI

SEQ ID NO: 28670 - protein, 13 aa, BK virus
YLIPVEMKMLGIL

SEQ ID NO: 28671 - protein, 13 aa, BK virus
LIPVEMKMLGILG

SEQ ID NO: 28672 - protein, 13 aa, BK virus
IPVEMKMLGILGL

SEQ ID NO: 28673 - protein, 13 aa, BK virus
PVEMKMLGILGLS

SEQ ID NO: 28674 - protein, 13 aa, BK virus
VEMKMLGILGLSQ

SEQ ID NO: 28675 - protein, 13 aa, BK virus
EMKMLGILGLSQE

SEQ ID NO: 28676 - protein, 13 aa, BK virus
MKMLGILGLSQEG

SEQ ID NO: 28677 - protein, 13 aa, BK virus
KMLGILGLSQEGK

SEQ ID NO: 28678 - protein, 13 aa, BK virus
MLGILGLSQEGKM

SEQ ID NO: 28679 - protein, 13 aa, BK virus
LGILGLSQEGKMF

SEQ ID NO: 28680 - protein, 13 aa, BK virus
GILGLSQEGKMFP

SEQ ID NO: 28681 - protein, 13 aa, BK virus
ILGLSQEGKMFPQ

SEQ ID NO: 28682 - protein, 13 aa, BK virus
LGLSQEGKMFPQY

SEQ ID NO: 28683 - protein, 13 aa, BK virus
GLSQEGKMFPQYF

SEQ ID NO: 28684 - protein, 13 aa, BK virus
LSQEGKMFPQYFM

SEQ ID NO: 28685 - protein, 13 aa, BK virus
MNRVWGLFVKLIA

SEQ ID NO: 28686 - protein, 13 aa, BK virus
NRVWGLFVKLIAC

SEQ ID NO: 28687 - protein, 13 aa, BK virus
RVWGLFVKLIACM

SEQ ID NO: 28688 - protein, 13 aa, BK virus
VWGLFVKLIACMF

SEQ ID NO: 28689 - protein, 13 aa, BK virus
WGLFVKLIACMFQ

SEQ ID NO: 28690 - protein, 13 aa, BK virus
GLFVKLIACMFQL

SEQ ID NO: 28691 - protein, 13 aa, BK virus
LFVKLIACMFQLL

SEQ ID NO: 28692 - protein, 13 aa, BK virus
FVKLIACMFQLLI

SEQ ID NO: 28693 - protein, 13 aa, BK virus
VKLIACMFQLLIF

SEQ ID NO: 28694 - protein, 13 aa, BK virus
KLIACMFQLLIFV

SEQ ID NO: 28695 - protein, 13 aa, BK virus
LIACMFQLLIFVA

SEQ ID NO: 28696 - protein, 13 aa, BK virus
IACMFQLLIFVAC

SEQ ID NO: 28697 - protein, 13 aa, BK virus
ACMFQLLIFVACL

SEQ ID NO: 28698 - protein, 13 aa, BK virus
CMFQLLIFVACLL

SEQ ID NO: 28699 - protein, 13 aa, BK virus
MFQLLIFVACLLT

SEQ ID NO: 28700 - protein, 13 aa, BK virus
FQLLIFVACLLTA

SEQ ID NO: 28701 - protein, 13 aa, BK virus
QLLIFVACLLTAL

SEQ ID NO: 28702 - protein, 13 aa, BK virus
LLIFVACLLTALE

SEQ ID NO: 28703 - protein, 13 aa, BK virus
LIFVACLLTALEH

SEQ ID NO: 28704 - protein, 13 aa, BK virus
IFVACLLTALEHN

SEQ ID NO: 28705 - protein, 13 aa, BK virus
FVACLLTALEHNS

SEQ ID NO: 28706 - protein, 13 aa, BK virus
VACLLTALEHNSG

SEQ ID NO: 28707 - protein, 13 aa, BK virus
ACLLTALEHNSGE

SEQ ID NO: 28708 - protein, 13 aa, BK virus
CLLTALEHNSGEA

SEQ ID NO: 28709 - protein, 13 aa, BK virus
LLTALEHNSGEAL

SEQ ID NO: 28710 - protein, 13 aa, BK virus
LTALEHNSGEALQ

SEQ ID NO: 28711 - protein, 13 aa, BK virus
TALEHNSGEALQD

SEQ ID NO: 28712 - protein, 13 aa, BK virus
ALEHNSGEALQDI

SEQ ID NO: 28713 - protein, 13 aa, BK virus
LEHNSGEALQDIL

SEQ ID NO: 28714 - protein, 13 aa, BK virus
EHNSGEALQDILR

SEQ ID NO: 28715 - protein, 13 aa, BK virus
HNSGEALQDILRS

SEQ ID NO: 28716 - protein, 13 aa, BK virus
NSGEALQDILRSA

SEQ ID NO: 28717 - protein, 13 aa, BK virus
TGEPREWMGSLCM

SEQ ID NO: 28718 - protein, 13 aa, BK virus
GEPREWMGSLCMV

SEQ ID NO: 28719 - protein, 13 aa, BK virus
EPREWMGSLCMVW

SEQ ID NO: 28720 - protein, 13 aa, BK virus
PREWMGSLCMVWN

SEQ ID NO: 28721 - protein, 13 aa, BK virus
REWMGSLCMVWNP

SEQ ID NO: 28722 - protein, 13 aa, BK virus
EWMGSLCMVWNPR

SEQ ID NO: 28723 - protein, 13 aa, BK virus
KRLGCLMAQKDFQ

SEQ ID NO: 28724 - protein, 13 aa, BK virus
RLGCLMAQKDFQG

SEQ ID NO: 28725 - protein, 13 aa, BK virus
LGCLMAQKDFQGT

SEQ ID NO: 28726 - protein, 13 aa, BK virus
GCLMAQKDFQGTQ

SEQ ID NO: 28727 - protein, 13 aa, BK virus
CLMAQKDFQGTQI

SEQ ID NO: 28728 - protein, 13 aa, BK virus
DILTNRDNCKPKC

SEQ ID NO: 28729 - protein, 13 aa, BK virus
ILTNRDNCKPKCF

SEQ ID NO: 28730 - protein, 13 aa, BK virus
LTNRDNCKPKCFK

SEQ ID NO: 28731 - protein, 13 aa, BK virus
TNRDNCKPKCFKQ

SEQ ID NO: 28732 - protein, 13 aa, BK virus
NRDNCKPKCFKQV

SEQ ID NO: 28733 - protein, 13 aa, BK virus
RDNCKPKCFKQVL

SEQ ID NO: 28734 - protein, 13 aa, BK virus
DNCKPKCFKQVLL

SEQ ID NO: 28735 - protein, 13 aa, BK virus
NCKPKCFKQVLLL

SEQ ID NO: 28736 - protein, 13 aa, BK virus
CKPKCFKQVLLLY

SEQ ID NO: 28737 - protein, 13 aa, BK virus
KPKCFKQVLLLYI

SEQ ID NO: 28738 - protein, 13 aa, BK virus
PKCFKQVLLLYIY

SEQ ID NO: 28739 - protein, 13 aa, BK virus
KCFKQVLLLYIYI

SEQ ID NO: 28740 - protein, 13 aa, BK virus
MLLLYKPLLSLCY

SEQ ID NO: 28741 - protein, 13 aa, BK virus
LLLYKPLLSLCYF

SEQ ID NO: 28742 - protein, 13 aa, BK virus
LLYKPLLSLCYFG

SEQ ID NO: 28743 - protein, 13 aa, BK virus
LYKPLLSLCYFGG

SEQ ID NO: 28744 - protein, 13 aa, BK virus
YKPLLSLCYFGGG

SEQ ID NO: 28745 - protein, 13 aa, BK virus
KPLLSLCYFGGGV

SEQ ID NO: 28746 - protein, 13 aa, BK virus
PLLSLCYFGGGVL

SEQ ID NO: 28747 - protein, 13 aa, BK virus
LLSLCYFGGGVLG

SEQ ID NO: 28748 - protein, 13 aa, BK virus
LSLCYFGGGVLGL

SEQ ID NO: 28749 - protein, 13 aa, BK virus
SLCYFGGGVLGLL

SEQ ID NO: 28750 - protein, 13 aa, BK virus
LCYFGGGVLGLLK

SEQ ID NO: 28751 - protein, 13 aa, BK virus
CYFGGGVLGLLKH

SEQ ID NO: 28752 - protein, 13 aa, BK virus
LWGSDLWESSAGA

SEQ ID NO: 28753 - protein, 13 aa, BK virus
WGSDLWESSAGAE

SEQ ID NO: 28754 - protein, 13 aa, BK virus
GSDLWESSAGAEV

SEQ ID NO: 28755 - protein, 13 aa, BK virus
SDLWESSAGAEVS

SEQ ID NO: 28756 - protein, 13 aa, BK virus
DLWESSAGAEVSE

SEQ ID NO: 28757 - protein, 13 aa, BK virus
LWESSAGAEVSET

SEQ ID NO: 28758 - protein, 13 aa, BK virus
WESSAGAEVSETW

SEQ ID NO: 28759 - protein, 13 aa, BK virus
ESSAGAEVSETWE

SEQ ID NO: 28760 - protein, 13 aa, BK virus
SSAGAEVSETWEE

SEQ ID NO: 28761 - protein, 13 aa, BK virus
SAGAEVSETWEEH

SEQ ID NO: 28762 - protein, 13 aa, BK virus
AGAEVSETWEEHC

SEQ ID NO: 28763 - protein, 13 aa, BK virus
GAEVSETWEEHCD

SEQ ID NO: 28764 - protein, 13 aa, BK virus
AEVSETWEEHCDW

SEQ ID NO: 28765 - protein, 13 aa, BK virus
EVSETWEEHCDWD

SEQ ID NO: 28766 - protein, 13 aa, BK virus
VSETWEEHCDWDS

SEQ ID NO: 28767 - protein, 13 aa, BK virus
SETWEEHCDWDSV

SEQ ID NO: 28768 - protein, 13 aa, BK virus
ETWEEHCDWDSVL

SEQ ID NO: 28769 - protein, 13 aa, BK virus
TWEEHCDWDSVLD

SEQ ID NO: 28770 - protein, 13 aa, BK virus
WEEHCDWDSVLDP

SEQ ID NO: 28771 - protein, 13 aa, BK virus
EEHCDWDSVLDPC

SEQ ID NO: 28772 - protein, 13 aa, BK virus
EHCDWDSVLDPCP

SEQ ID NO: 28773 - protein, 13 aa, BK virus
HCDWDSVLDPCPE

SEQ ID NO: 28774 - protein, 13 aa, BK virus
CDWDSVLDPCPES

SEQ ID NO: 28775 - protein, 13 aa, BK virus
DWDSVLDPCPESS

SEQ ID NO: 28776 - protein, 13 aa, BK virus
WDSVLDPCPESSV

SEQ ID NO: 28777 - protein, 13 aa, BK virus
DSVLDPCPESSVS

SEQ ID NO: 28778 - protein, 13 aa, BK virus
SVLDPCPESSVSE

SEQ ID NO: 28779 - protein, 13 aa, BK virus
VLDPCPESSVSES

SEQ ID NO: 28780 - protein, 13 aa, BK virus
LDPCPESSVSESS

SEQ ID NO: 28781 - protein, 13 aa, BK virus
DPCPESSVSESSS

SEQ ID NO: 28782 - protein, 13 aa, BK virus
PCPESSVSESSSL

SEQ ID NO: 28783 - protein, 13 aa, BK virus
CPESSVSESSSLV

SEQ ID NO: 28784 - protein, 13 aa, BK virus
PESSVSESSSLVI

SEQ ID NO: 28785 - protein, 13 aa, BK virus
ESSVSESSSLVIS

SEQ ID NO: 28786 - protein, 13 aa, BK virus
SSVSESSSLVISR

SEQ ID NO: 28787 - protein, 13 aa, BK virus
SVSESSSLVISRI

SEQ ID NO: 28788 - protein, 13 aa, BK virus
VSESSSLVISRIH

SEQ ID NO: 28789 - protein, 13 aa, BK virus
SESSSLVISRIHF

SEQ ID NO: 28790 - protein, 13 aa, BK virus
ESSSLVISRIHFP

SEQ ID NO: 28791 - protein, 13 aa, BK virus
SSSLVISRIHFPM

SEQ ID NO: 28792 - protein, 13 aa, BK virus
SSLVISRIHFPMH

SEQ ID NO: 28793 - protein, 13 aa, BK virus
SLVISRIHFPMHI

SEQ ID NO: 28794 - protein, 13 aa, BK virus
LVISRIHFPMHIL

SEQ ID NO: 28795 - protein, 13 aa, BK virus
VISRIHFPMHILY

SEQ ID NO: 28796 - protein, 13 aa, BK virus
ISRIHFPMHILYF

SEQ ID NO: 28797 - protein, 13 aa, BK virus
SRIHFPMHILYFI

SEQ ID NO: 28798 - protein, 13 aa, BK virus
RIHFPMHILYFIL

SEQ ID NO: 28799 - protein, 13 aa, BK virus
IHFPMHILYFILE

SEQ ID NO: 28800 - protein, 13 aa, BK virus
HFPMHILYFILEK

SEQ ID NO: 28801 - protein, 13 aa, BK virus
FPMHILYFILEKV

SEQ ID NO: 28802 - protein, 13 aa, BK virus
PMHILYFILEKVY

SEQ ID NO: 28803 - protein, 13 aa, BK virus
MHILYFILEKVYI

SEQ ID NO: 28804 - protein, 13 aa, BK virus
HILYFILEKVYIL

SEQ ID NO: 28805 - protein, 13 aa, BK virus
ILYFILEKVYILI

SEQ ID NO: 28806 - protein, 13 aa, BK virus
LYFILEKVYILIS

SEQ ID NO: 28807 - protein, 13 aa, BK virus
YFILEKVYILISE

SEQ ID NO: 28808 - protein, 13 aa, BK virus
FILEKVYILISES

SEQ ID NO: 28809 - protein, 13 aa, BK virus
ILEKVYILISESS

SEQ ID NO: 28810 - protein, 13 aa, BK virus
LEKVYILISESSL

SEQ ID NO: 28811 - protein, 13 aa, BK virus
EKVYILISESSLS

SEQ ID NO: 28812 - protein, 13 aa, BK virus
KVYILISESSLSF

SEQ ID NO: 28813 - protein, 13 aa, BK virus
VYILISESSLSFH

SEQ ID NO: 28814 - protein, 13 aa, BK virus
YILISESSLSFHS

SEQ ID NO: 28815 - protein, 13 aa, BK virus
ILISESSLSFHST

SEQ ID NO: 28816 - protein, 13 aa, BK virus
LISESSLSFHSTI

SEQ ID NO: 28817 - protein, 13 aa, BK virus
ISESSLSFHSTIL

SEQ ID NO: 28818 - protein, 13 aa, BK virus
SESSLSFHSTILD

SEQ ID NO: 28819 - protein, 13 aa, BK virus
ESSLSFHSTILDC

SEQ ID NO: 28820 - protein, 13 aa, BK virus
SSLSFHSTILDCI

SEQ ID NO: 28821 - protein, 13 aa, BK virus
SLSFHSTILDCIS

SEQ ID NO: 28822 - protein, 13 aa, BK virus
LSFHSTILDCISV

SEQ ID NO: 28823 - protein, 13 aa, BK virus
SFHSTILDCISVA

SEQ ID NO: 28824 - protein, 13 aa, BK virus
FHSTILDCISVAK

SEQ ID NO: 28825 - protein, 13 aa, BK virus
HSTILDCISVAKS

SEQ ID NO: 28826 - protein, 13 aa, BK virus
STILDCISVAKSA

SEQ ID NO: 28827 - protein, 13 aa, BK virus
TILDCISVAKSAT

SEQ ID NO: 28828 - protein, 13 aa, BK virus
ILDCISVAKSATG

SEQ ID NO: 28829 - protein, 13 aa, BK virus
LDCISVAKSATGL

SEQ ID NO: 28830 - protein, 13 aa, BK virus
DCISVAKSATGLN

SEQ ID NO: 28831 - protein, 13 aa, BK virus
CISVAKSATGLNQ

SEQ ID NO: 28832 - protein, 13 aa, BK virus
ISVAKSATGLNQI

SEQ ID NO: 28833 - protein, 13 aa, BK virus
SVAKSATGLNQIS

SEQ ID NO: 28834 - protein, 13 aa, BK virus
VAKSATGLNQISS

SEQ ID NO: 28835 - protein, 13 aa, BK virus
AKSATGLNQISSS

SEQ ID NO: 28836 - protein, 13 aa, BK virus
KSATGLNQISSSN

SEQ ID NO: 28837 - protein, 13 aa, BK virus
SATGLNQISSSNK

SEQ ID NO: 28838 - protein, 13 aa, BK virus
ATGLNQISSSNKV

SEQ ID NO: 28839 - protein, 13 aa, BK virus
TGLNQISSSNKVI

SEQ ID NO: 28840 - protein, 13 aa, BK virus
GLNQISSSNKVIP

SEQ ID NO: 28841 - protein, 13 aa, BK virus
LNQISSSNKVIPL

SEQ ID NO: 28842 - protein, 13 aa, BK virus
NQISSSNKVIPLC

SEQ ID NO: 28843 - protein, 13 aa, BK virus
QISSSNKVIPLCK

SEQ ID NO: 28844 - protein, 13 aa, BK virus
ISSSNKVIPLCKI

SEQ ID NO: 28845 - protein, 13 aa, BK virus
SSSNKVIPLCKIL

SEQ ID NO: 28846 - protein, 13 aa, BK virus
SSNKVIPLCKILF

SEQ ID NO: 28847 - protein, 13 aa, BK virus
SNKVIPLCKILFS

SEQ ID NO: 28848 - protein, 13 aa, BK virus
NKVIPLCKILFSS

SEQ ID NO: 28849 - protein, 13 aa, BK virus
KVIPLCKILFSSK

SEQ ID NO: 28850 - protein, 13 aa, BK virus
VIPLCKILFSSKN

SEQ ID NO: 28851 - protein, 13 aa, BK virus
IPLCKILFSSKNS

SEQ ID NO: 28852 - protein, 13 aa, BK virus
PLCKILFSSKNSE

SEQ ID NO: 28853 - protein, 13 aa, BK virus
LCKILFSSKNSEF

SEQ ID NO: 28854 - protein, 13 aa, BK virus
CKILFSSKNSEFC

SEQ ID NO: 28855 - protein, 13 aa, BK virus
KILFSSKNSEFCK

SEQ ID NO: 28856 - protein, 13 aa, BK virus
ILFSSKNSEFCKD

SEQ ID NO: 28857 - protein, 13 aa, BK virus
LFSSKNSEFCKDF

SEQ ID NO: 28858 - protein, 13 aa, BK virus
FSSKNSEFCKDFL

SEQ ID NO: 28859 - protein, 13 aa, BK virus
SSKNSEFCKDFLK

SEQ ID NO: 28860 - protein, 13 aa, BK virus
SKNSEFCKDFLKY

SEQ ID NO: 28861 - protein, 13 aa, BK virus
KNSEFCKDFLKYI

SEQ ID NO: 28862 - protein, 13 aa, BK virus
NSEFCKDFLKYIL

SEQ ID NO: 28863 - protein, 13 aa, BK virus
SEFCKDFLKYILG

SEQ ID NO: 28864 - protein, 13 aa, BK virus
EFCKDFLKYILGL

SEQ ID NO: 28865 - protein, 13 aa, BK virus
FCKDFLKYILGLK

SEQ ID NO: 28866 - protein, 13 aa, BK virus
CKDFLKYILGLKS

SEQ ID NO: 28867 - protein, 13 aa, BK virus
KDFLKYILGLKSI

SEQ ID NO: 28868 - protein, 13 aa, BK virus
DFLKYILGLKSIC

SEQ ID NO: 28869 - protein, 13 aa, BK virus
FLKYILGLKSICL

SEQ ID NO: 28870 - protein, 13 aa, BK virus
LKYILGLKSICLT

SEQ ID NO: 28871 - protein, 13 aa, BK virus
KYILGLKSICLTN

SEQ ID NO: 28872 - protein, 13 aa, BK virus
YILGLKSICLTNL

SEQ ID NO: 28873 - protein, 13 aa, BK virus
ILGLKSICLTNLA

SEQ ID NO: 28874 - protein, 13 aa, BK virus
LGLKSICLTNLAC

SEQ ID NO: 28875 - protein, 13 aa, BK virus
GLKSICLTNLACR

SEQ ID NO: 28876 - protein, 13 aa, BK virus
LKSICLTNLACRV

SEQ ID NO: 28877 - protein, 13 aa, BK virus
KSICLTNLACRVL

SEQ ID NO: 28878 - protein, 13 aa, BK virus
SICLTNLACRVLG

SEQ ID NO: 28879 - protein, 13 aa, BK virus
ICLTNLACRVLGT

SEQ ID NO: 28880 - protein, 13 aa, BK virus
CLTNLACRVLGTG

SEQ ID NO: 28881 - protein, 13 aa, BK virus
LTNLACRVLGTGY

SEQ ID NO: 28882 - protein, 13 aa, BK virus
TNLACRVLGTGYS

SEQ ID NO: 28883 - protein, 13 aa, BK virus
NLACRVLGTGYSF

SEQ ID NO: 28884 - protein, 13 aa, BK virus
LACRVLGTGYSFI

SEQ ID NO: 28885 - protein, 13 aa, BK virus
ACRVLGTGYSFIV

SEQ ID NO: 28886 - protein, 13 aa, BK virus
CRVLGTGYSFIVT

SEQ ID NO: 28887 - protein, 13 aa, BK virus
RVLGTGYSFIVTK

SEQ ID NO: 28888 - protein, 13 aa, BK virus
VLGTGYSFIVTKP

SEQ ID NO: 28889 - protein, 13 aa, BK virus
LGTGYSFIVTKPG

SEQ ID NO: 28890 - protein, 13 aa, BK virus
GTGYSFIVTKPGG

SEQ ID NO: 28891 - protein, 13 aa, BK virus
TGYSFIVTKPGGN

SEQ ID NO: 28892 - protein, 13 aa, BK virus
GYSFIVTKPGGNI

SEQ ID NO: 28893 - protein, 13 aa, BK virus
YSFIVTKPGGNIW

SEQ ID NO: 28894 - protein, 13 aa, BK virus
SFIVTKPGGNIWV

SEQ ID NO: 28895 - protein, 13 aa, BK virus
FIVTKPGGNIWVL

SEQ ID NO: 28896 - protein, 13 aa, BK virus
IVTKPGGNIWVLL

SEQ ID NO: 28897 - protein, 13 aa, BK virus
VTKPGGNIWVLLF

SEQ ID NO: 28898 - protein, 13 aa, BK virus
TKPGGNIWVLLFK

SEQ ID NO: 28899 - protein, 13 aa, BK virus
KPGGNIWVLLFKC

SEQ ID NO: 28900 - protein, 13 aa, BK virus
PGGNIWVLLFKCF

SEQ ID NO: 28901 - protein, 13 aa, BK virus
GGNIWVLLFKCFF

SEQ ID NO: 28902 - protein, 13 aa, BK virus
GNIWVLLFKCFFS

SEQ ID NO: 28903 - protein, 13 aa, BK virus
NIWVLLFKCFFSK

SEQ ID NO: 28904 - protein, 13 aa, BK virus
IWVLLFKCFFSKF

SEQ ID NO: 28905 - protein, 13 aa, BK virus
WVLLFKCFFSKFT

SEQ ID NO: 28906 - protein, 13 aa, BK virus
VLLFKCFFSKFTL

SEQ ID NO: 28907 - protein, 13 aa, BK virus
LLFKCFFSKFTLT

SEQ ID NO: 28908 - protein, 13 aa, BK virus
LFKCFFSKFTLTL

SEQ ID NO: 28909 - protein, 13 aa, BK virus
FKCFFSKFTLTLP

SEQ ID NO: 28910 - protein, 13 aa, BK virus
KCFFSKFTLTLPS

SEQ ID NO: 28911 - protein, 13 aa, BK virus
CFFSKFTLTLPSK

SEQ ID NO: 28912 - protein, 13 aa, BK virus
SLKLSKLFIPCPE

SEQ ID NO: 28913 - protein, 13 aa, BK virus
LKLSKLFIPCPEG

SEQ ID NO: 28914 - protein, 13 aa, BK virus
KLSKLFIPCPEGK

SEQ ID NO: 28915 - protein, 13 aa, BK virus
LSKLFIPCPEGKS

SEQ ID NO: 28916 - protein, 13 aa, BK virus
SKLFIPCPEGKSF

SEQ ID NO: 28917 - protein, 13 aa, BK virus
KLFIPCPEGKSFD

SEQ ID NO: 28918 - protein, 13 aa, BK virus
LFIPCPEGKSFDS

SEQ ID NO: 28919 - protein, 13 aa, BK virus
FIPCPEGKSFDSA

SEQ ID NO: 28920 - protein, 13 aa, BK virus
IPCPEGKSFDSAP

SEQ ID NO: 28921 - protein, 13 aa, BK virus
PCPEGKSFDSAPV

SEQ ID NO: 28922 - protein, 13 aa, BK virus
CPEGKSFDSAPVP

SEQ ID NO: 28923 - protein, 13 aa, BK virus
PEGKSFDSAPVPF

SEQ ID NO: 28924 - protein, 13 aa, BK virus
EGKSFDSAPVPFT

SEQ ID NO: 28925 - protein, 13 aa, BK virus
GKSFDSAPVPFTS

SEQ ID NO: 28926 - protein, 13 aa, BK virus
KSFDSAPVPFTSS

SEQ ID NO: 28927 - protein, 13 aa, BK virus
SFDSAPVPFTSSK

SEQ ID NO: 28928 - protein, 13 aa, BK virus
FDSAPVPFTSSKT

SEQ ID NO: 28929 - protein, 13 aa, BK virus
DSAPVPFTSSKTT

SEQ ID NO: 28930 - protein, 13 aa, BK virus
SAPVPFTSSKTTM

SEQ ID NO: 28931 - protein, 13 aa, BK virus
APVPFTSSKTTMY

SEQ ID NO: 28932 - protein, 13 aa, BK virus
SIATPSSKVSLSM

SEQ ID NO: 28933 - protein, 13 aa, BK virus
IATPSSKVSLSMG

SEQ ID NO: 28934 - protein, 13 aa, BK virus
ATPSSKVSLSMGR

SEQ ID NO: 28935 - protein, 13 aa, BK virus
TPSSKVSLSMGRF

SEQ ID NO: 28936 - protein, 13 aa, BK virus
PSSKVSLSMGRFT

SEQ ID NO: 28937 - protein, 13 aa, BK virus
SSKVSLSMGRFTF

SEQ ID NO: 28938 - protein, 13 aa, BK virus
SKVSLSMGRFTFK

SEQ ID NO: 28939 - protein, 13 aa, BK virus
KVSLSMGRFTFKA

SEQ ID NO: 28940 - protein, 13 aa, BK virus
VSLSMGRFTFKAL

SEQ ID NO: 28941 - protein, 13 aa, BK virus
SLSMGRFTFKALP

SEQ ID NO: 28942 - protein, 13 aa, BK virus
LSMGRFTFKALPP

SEQ ID NO: 28943 - protein, 13 aa, BK virus
SMGRFTFKALPPH

SEQ ID NO: 28944 - protein, 13 aa, BK virus
MGRFTFKALPPHK

SEQ ID NO: 28945 - protein, 13 aa, BK virus
GRFTFKALPPHKS

SEQ ID NO: 28946 - protein, 13 aa, BK virus
RFTFKALPPHKSN

SEQ ID NO: 28947 - protein, 13 aa, BK virus
FTFKALPPHKSNN

SEQ ID NO: 28948 - protein, 13 aa, BK virus
TFKALPPHKSNNP

SEQ ID NO: 28949 - protein, 13 aa, BK virus
FKALPPHKSNNPA

SEQ ID NO: 28950 - protein, 13 aa, BK virus
KALPPHKSNNPAA

SEQ ID NO: 28951 - protein, 13 aa, BK virus
ALPPHKSNNPAAS

SEQ ID NO: 28952 - protein, 13 aa, BK virus
LPPHKSNNPAASV

SEQ ID NO: 28953 - protein, 13 aa, BK virus
PPHKSNNPAASVV

SEQ ID NO: 28954 - protein, 13 aa, BK virus
PHKSNNPAASVVF

SEQ ID NO: 28955 - protein, 13 aa, BK virus
HKSNNPAASVVFP

SEQ ID NO: 28956 - protein, 13 aa, BK virus
KSNNPAASVVFPL

SEQ ID NO: 28957 - protein, 13 aa, BK virus
SNNPAASVVFPLS

SEQ ID NO: 28958 - protein, 13 aa, BK virus
NNPAASVVFPLSM

SEQ ID NO: 28959 - protein, 13 aa, BK virus
NPAASVVFPLSMG

SEQ ID NO: 28960 - protein, 13 aa, BK virus
PAASVVFPLSMGP

SEQ ID NO: 28961 - protein, 13 aa, BK virus
AASVVFPLSMGPL

SEQ ID NO: 28962 - protein, 13 aa, BK virus
ASVVFPLSMGPLN

SEQ ID NO: 28963 - protein, 13 aa, BK virus
SVVFPLSMGPLNN

SEQ ID NO: 28964 - protein, 13 aa, BK virus
VVFPLSMGPLNNQ

SEQ ID NO: 28965 - protein, 13 aa, BK virus
VFPLSMGPLNNQY

SEQ ID NO: 28966 - protein, 13 aa, BK virus
FPLSMGPLNNQYL

SEQ ID NO: 28967 - protein, 13 aa, BK virus
PLSMGPLNNQYLL

SEQ ID NO: 28968 - protein, 13 aa, BK virus
LSMGPLNNQYLLL

SEQ ID NO: 28969 - protein, 13 aa, BK virus
SMGPLNNQYLLLG

SEQ ID NO: 28970 - protein, 13 aa, BK virus
MGPLNNQYLLLGT

SEQ ID NO: 28971 - protein, 13 aa, BK virus
GPLNNQYLLLGTL

SEQ ID NO: 28972 - protein, 13 aa, BK virus
PLNNQYLLLGTLK

SEQ ID NO: 28973 - protein, 13 aa, BK virus
LNNQYLLLGTLKT

SEQ ID NO: 28974 - protein, 13 aa, BK virus
NNQYLLLGTLKTI

SEQ ID NO: 28975 - protein, 13 aa, BK virus
NQYLLLGTLKTIQ

SEQ ID NO: 28976 - protein, 13 aa, BK virus
QYLLLGTLKTIQC

SEQ ID NO: 28977 - protein, 13 aa, BK virus
YLLLGTLKTIQCK

SEQ ID NO: 28978 - protein, 13 aa, BK virus
LLLGTLKTIQCKK

SEQ ID NO: 28979 - protein, 13 aa, BK virus
LLGTLKTIQCKKS

SEQ ID NO: 28980 - protein, 13 aa, BK virus
LGTLKTIQCKKSN

SEQ ID NO: 28981 - protein, 13 aa, BK virus
GTLKTIQCKKSNI

SEQ ID NO: 28982 - protein, 13 aa, BK virus
TLKTIQCKKSNIT

SEQ ID NO: 28983 - protein, 13 aa, BK virus
LKTIQCKKSNITE

SEQ ID NO: 28984 - protein, 13 aa, BK virus
KTIQCKKSNITES

SEQ ID NO: 28985 - protein, 13 aa, BK virus
TIQCKKSNITESI

SEQ ID NO: 28986 - protein, 13 aa, BK virus
IQCKKSNITESIL

SEQ ID NO: 28987 - protein, 13 aa, BK virus
QCKKSNITESILG

SEQ ID NO: 28988 - protein, 13 aa, BK virus
CKKSNITESILGS

SEQ ID NO: 28989 - protein, 13 aa, BK virus
KKSNITESILGSK

SEQ ID NO: 28990 - protein, 13 aa, BK virus
KSNITESILGSKQ

SEQ ID NO: 28991 - protein, 13 aa, BK virus
SNITESILGSKQC

SEQ ID NO: 28992 - protein, 13 aa, BK virus
NITESILGSKQCS

SEQ ID NO: 28993 - protein, 13 aa, BK virus
ITESILGSKQCSQ

SEQ ID NO: 28994 - protein, 13 aa, BK virus
TESILGSKQCSQA

SEQ ID NO: 28995 - protein, 13 aa, BK virus
ESILGSKQCSQAT

SEQ ID NO: 28996 - protein, 13 aa, BK virus
SILGSKQCSQATP

SEQ ID NO: 28997 - protein, 13 aa, BK virus
ILGSKQCSQATPA

SEQ ID NO: 28998 - protein, 13 aa, BK virus
LGSKQCSQATPAI

SEQ ID NO: 28999 - protein, 13 aa, BK virus
GSKQCSQATPAIY

SEQ ID NO: 29000 - protein, 13 aa, BK virus
SKQCSQATPAIYC

SEQ ID NO: 29001 - protein, 13 aa, BK virus
KQCSQATPAIYCS

SEQ ID NO: 29002 - protein, 13 aa, BK virus
QCSQATPAIYCSS

SEQ ID NO: 29003 - protein, 13 aa, BK virus
CSQATPAIYCSST

SEQ ID NO: 29004 - protein, 13 aa, BK virus
SQATPAIYCSSTA

SEQ ID NO: 29005 - protein, 13 aa, BK virus
QATPAIYCSSTAF

SEQ ID NO: 29006 - protein, 13 aa, BK virus
ATPAIYCSSTAFP

SEQ ID NO: 29007 - protein, 13 aa, BK virus
RVSTLFLAKTVST

SEQ ID NO: 29008 - protein, 13 aa, BK virus
VSTLFLAKTVSTA

SEQ ID NO: 29009 - protein, 13 aa, BK virus
STLFLAKTVSTAC

SEQ ID NO: 29010 - protein, 13 aa, BK virus
FLLSAKIIAFAKC

SEQ ID NO: 29011 - protein, 13 aa, BK virus
LLSAKIIAFAKCF

SEQ ID NO: 29012 - protein, 13 aa, BK virus
LSAKIIAFAKCFS

SEQ ID NO: 29013 - protein, 13 aa, BK virus
NSKYIPNNKNTSS

SEQ ID NO: 29014 - protein, 13 aa, BK virus
SKYIPNNKNTSSH

SEQ ID NO: 29015 - protein, 13 aa, BK virus
KYIPNNKNTSSHF

SEQ ID NO: 29016 - protein, 13 aa, BK virus
YIPNNKNTSSHFV

SEQ ID NO: 29017 - protein, 13 aa, BK virus
IPNNKNTSSHFVS

SEQ ID NO: 29018 - protein, 13 aa, BK virus
PNNKNTSSHFVST

SEQ ID NO: 29019 - protein, 13 aa, BK virus
NNKNTSSHFVSTA

SEQ ID NO: 29020 - protein, 13 aa, BK virus
NKNTSSHFVSTAY

SEQ ID NO: 29021 - protein, 13 aa, BK virus
KNTSSHFVSTAYS

SEQ ID NO: 29022 - protein, 13 aa, BK virus
NTSSHFVSTAYSV

SEQ ID NO: 29023 - protein, 13 aa, BK virus
TSSHFVSTAYSVI

SEQ ID NO: 29024 - protein, 13 aa, BK virus
SSHFVSTAYSVIN

SEQ ID NO: 29025 - protein, 13 aa, BK virus
SHFVSTAYSVINF

SEQ ID NO: 29026 - protein, 13 aa, BK virus
HFVSTAYSVINFQ

SEQ ID NO: 29027 - protein, 13 aa, BK virus
FVSTAYSVINFQD

SEQ ID NO: 29028 - protein, 13 aa, BK virus
VSTAYSVINFQDT

SEQ ID NO: 29029 - protein, 13 aa, BK virus
STAYSVINFQDTC

SEQ ID NO: 29030 - protein, 13 aa, BK virus
TAYSVINFQDTCF

SEQ ID NO: 29031 - protein, 13 aa, BK virus
AYSVINFQDTCFV

SEQ ID NO: 29032 - protein, 13 aa, BK virus
YSVINFQDTCFVS

SEQ ID NO: 29033 - protein, 13 aa, BK virus
SVINFQDTCFVSS

SEQ ID NO: 29034 - protein, 13 aa, BK virus
VINFQDTCFVSSG

SEQ ID NO: 29035 - protein, 13 aa, BK virus
INFQDTCFVSSGS

SEQ ID NO: 29036 - protein, 13 aa, BK virus
NFQDTCFVSSGSS

SEQ ID NO: 29037 - protein, 13 aa, BK virus
FQDTCFVSSGSSG

SEQ ID NO: 29038 - protein, 13 aa, BK virus
QDTCFVSSGSSGL

SEQ ID NO: 29039 - protein, 13 aa, BK virus
DTCFVSSGSSGLK

SEQ ID NO: 29040 - protein, 13 aa, BK virus
TCFVSSGSSGLKS

SEQ ID NO: 29041 - protein, 13 aa, BK virus
CFVSSGSSGLKSC

SEQ ID NO: 29042 - protein, 13 aa, BK virus
FVSSGSSGLKSCS

SEQ ID NO: 29043 - protein, 13 aa, BK virus
VSSGSSGLKSCSF

SEQ ID NO: 29044 - protein, 13 aa, BK virus
SSGSSGLKSCSFK

SEQ ID NO: 29045 - protein, 13 aa, BK virus
SGSSGLKSCSFKP

SEQ ID NO: 29046 - protein, 13 aa, BK virus
GSSGLKSCSFKPP

SEQ ID NO: 29047 - protein, 13 aa, BK virus
MLSSIVWYGSLVK

SEQ ID NO: 29048 - protein, 13 aa, BK virus
LSSIVWYGSLVKA

SEQ ID NO: 29049 - protein, 13 aa, BK virus
SSIVWYGSLVKAL

SEQ ID NO: 29050 - protein, 13 aa, BK virus
SIVWYGSLVKALY

SEQ ID NO: 29051 - protein, 13 aa, BK virus
IVWYGSLVKALYS

SEQ ID NO: 29052 - protein, 13 aa, BK virus
VWYGSLVKALYSK

SEQ ID NO: 29053 - protein, 13 aa, BK virus
WYGSLVKALYSKY

SEQ ID NO: 29054 - protein, 13 aa, BK virus
YGSLVKALYSKYS

SEQ ID NO: 29055 - protein, 13 aa, BK virus
GSLVKALYSKYSL

SEQ ID NO: 29056 - protein, 13 aa, BK virus
SLVKALYSKYSLL

SEQ ID NO: 29057 - protein, 13 aa, BK virus
LVKALYSKYSLLT

SEQ ID NO: 29058 - protein, 13 aa, BK virus
VKALYSKYSLLTP

SEQ ID NO: 29059 - protein, 13 aa, BK virus
KALYSKYSLLTPL

SEQ ID NO: 29060 - protein, 13 aa, BK virus
ALYSKYSLLTPLQ

SEQ ID NO: 29061 - protein, 13 aa, BK virus
LYSKYSLLTPLQI

SEQ ID NO: 29062 - protein, 13 aa, BK virus
YSKYSLLTPLQIK

SEQ ID NO: 29063 - protein, 13 aa, BK virus
SKYSLLTPLQIKK

SEQ ID NO: 29064 - protein, 13 aa, BK virus
KYSLLTPLQIKKL

SEQ ID NO: 29065 - protein, 13 aa, BK virus
YSLLTPLQIKKLK

SEQ ID NO: 29066 - protein, 13 aa, BK virus
SLLTPLQIKKLKV

SEQ ID NO: 29067 - protein, 13 aa, BK virus
LLTPLQIKKLKVH

SEQ ID NO: 29068 - protein, 13 aa, BK virus
LTPLQIKKLKVHS

SEQ ID NO: 29069 - protein, 13 aa, BK virus
TPLQIKKLKVHSF

SEQ ID NO: 29070 - protein, 13 aa, BK virus
QKLLIAETLCLCG

SEQ ID NO: 29071 - protein, 13 aa, BK virus
KLLIAETLCLCGV

SEQ ID NO: 29072 - protein, 13 aa, BK virus
LLIAETLCLCGVK

SEQ ID NO: 29073 - protein, 13 aa, BK virus
LIAETLCLCGVKK

SEQ ID NO: 29074 - protein, 13 aa, BK virus
IAETLCLCGVKKN

SEQ ID NO: 29075 - protein, 13 aa, BK virus
AETLCLCGVKKNI

SEQ ID NO: 29076 - protein, 13 aa, BK virus
ETLCLCGVKKNII

SEQ ID NO: 29077 - protein, 13 aa, BK virus
TLCLCGVKKNIIL

SEQ ID NO: 29078 - protein, 13 aa, BK virus
LCLCGVKKNIILC

SEQ ID NO: 29079 - protein, 13 aa, BK virus
CLCGVKKNIILCP

SEQ ID NO: 29080 - protein, 13 aa, BK virus
LCGVKKNIILCPA

SEQ ID NO: 29081 - protein, 13 aa, BK virus
CGVKKNIILCPAH

SEQ ID NO: 29082 - protein, 13 aa, BK virus
GVKKNIILCPAHM

SEQ ID NO: 29083 - protein, 13 aa, BK virus
VKKNIILCPAHMC

SEQ ID NO: 29084 - protein, 13 aa, BK virus
KKNIILCPAHMCL

SEQ ID NO: 29085 - protein, 13 aa, BK virus
KNIILCPAHMCLL

SEQ ID NO: 29086 - protein, 13 aa, BK virus
NIILCPAHMCLLI

SEQ ID NO: 29087 - protein, 13 aa, BK virus
IILCPAHMCLLIK

SEQ ID NO: 29088 - protein, 13 aa, BK virus
ILCPAHMCLLIKV

SEQ ID NO: 29089 - protein, 13 aa, BK virus
LCPAHMCLLIKVT

SEQ ID NO: 29090 - protein, 13 aa, BK virus
CPAHMCLLIKVTE

SEQ ID NO: 29091 - protein, 13 aa, BK virus
PAHMCLLIKVTEY

SEQ ID NO: 29092 - protein, 13 aa, BK virus
AHMCLLIKVTEYF

SEQ ID NO: 29093 - protein, 13 aa, BK virus
HMCLLIKVTEYFS

SEQ ID NO: 29094 - protein, 13 aa, BK virus
MCLLIKVTEYFSI

SEQ ID NO: 29095 - protein, 13 aa, BK virus
CLLIKVTEYFSIS

SEQ ID NO: 29096 - protein, 13 aa, BK virus
LLIKVTEYFSISF

SEQ ID NO: 29097 - protein, 13 aa, BK virus
LIKVTEYFSISFL

SEQ ID NO: 29098 - protein, 13 aa, BK virus
IKVTEYFSISFLY

SEQ ID NO: 29099 - protein, 13 aa, BK virus
KVTEYFSISFLYR

SEQ ID NO: 29100 - protein, 13 aa, BK virus
VTEYFSISFLYRI

SEQ ID NO: 29101 - protein, 13 aa, BK virus
AFSLVVYTAKQAR

SEQ ID NO: 29102 - protein, 13 aa, BK virus
FSLVVYTAKQARV

SEQ ID NO: 29103 - protein, 13 aa, BK virus
SLVVYTAKQARVL

SEQ ID NO: 29104 - protein, 13 aa, BK virus
LVVYTAKQARVLL

SEQ ID NO: 29105 - protein, 13 aa, BK virus
VVYTAKQARVLLL

SEQ ID NO: 29106 - protein, 13 aa, BK virus
VYTAKQARVLLLN

SEQ ID NO: 29107 - protein, 13 aa, BK virus
YTAKQARVLLLNT

SEQ ID NO: 29108 - protein, 13 aa, BK virus
TAKQARVLLLNTA

SEQ ID NO: 29109 - protein, 13 aa, BK virus
LRNWCRSEGKSLG

SEQ ID NO: 29110 - protein, 13 aa, BK virus
RNWCRSEGKSLGS

SEQ ID NO: 29111 - protein, 13 aa, BK virus
NWCRSEGKSLGSS

SEQ ID NO: 29112 - protein, 13 aa, BK virus
WCRSEGKSLGSST

SEQ ID NO: 29113 - protein, 13 aa, BK virus
CRSEGKSLGSSTF

SEQ ID NO: 29114 - protein, 13 aa, BK virus
RSEGKSLGSSTFL

SEQ ID NO: 29115 - protein, 13 aa, BK virus
SEGKSLGSSTFLF

SEQ ID NO: 29116 - protein, 13 aa, BK virus
EGKSLGSSTFLFF

SEQ ID NO: 29117 - protein, 13 aa, BK virus
GKSLGSSTFLFFL

SEQ ID NO: 29118 - protein, 13 aa, BK virus
KSLGSSTFLFFLG

SEQ ID NO: 29119 - protein, 13 aa, BK virus
SLGSSTFLFFLGG

SEQ ID NO: 29120 - protein, 13 aa, BK virus
LGSSTFLFFLGGV

SEQ ID NO: 29121 - protein, 13 aa, BK virus
GSSTFLFFLGGVE

SEQ ID NO: 29122 - protein, 13 aa, BK virus
SSTFLFFLGGVEC

SEQ ID NO: 29123 - protein, 13 aa, BK virus
ESAVASSSLANIS

SEQ ID NO: 29124 - protein, 13 aa, BK virus
SAVASSSLANISS

SEQ ID NO: 29125 - protein, 13 aa, BK virus
AVASSSLANISSW

SEQ ID NO: 29126 - protein, 13 aa, BK virus
VASSSLANISSWQ

SEQ ID NO: 29127 - protein, 13 aa, BK virus
ASSSLANISSWQN

SEQ ID NO: 29128 - protein, 13 aa, BK virus
SSSLANISSWQNK

SEQ ID NO: 29129 - protein, 13 aa, BK virus
SSLANISSWQNKS

SEQ ID NO: 29130 - protein, 13 aa, BK virus
SLANISSWQNKSS

SEQ ID NO: 29131 - protein, 13 aa, BK virus
LANISSWQNKSSS

SEQ ID NO: 29132 - protein, 13 aa, BK virus
ANISSWQNKSSSH

SEQ ID NO: 29133 - protein, 13 aa, BK virus
NISSWQNKSSSHF

SEQ ID NO: 29134 - protein, 13 aa, BK virus
ISSWQNKSSSHFS

SEQ ID NO: 29135 - protein, 13 aa, BK virus
SSWQNKSSSHFSL

SEQ ID NO: 29136 - protein, 13 aa, BK virus
SWQNKSSSHFSLK

SEQ ID NO: 29137 - protein, 13 aa, BK virus
WQNKSSSHFSLKE

SEQ ID NO: 29138 - protein, 13 aa, BK virus
QNKSSSHFSLKEL

SEQ ID NO: 29139 - protein, 13 aa, BK virus
NKSSSHFSLKELH

SEQ ID NO: 29140 - protein, 13 aa, BK virus
KSSSHFSLKELHQ

SEQ ID NO: 29141 - protein, 13 aa, BK virus
SSSHFSLKELHQD

SEQ ID NO: 29142 - protein, 13 aa, BK virus
SSHFSLKELHQDS

SEQ ID NO: 29143 - protein, 13 aa, BK virus
SHFSLKELHQDSH

SEQ ID NO: 29144 - protein, 13 aa, BK virus
HFSLKELHQDSHS

SEQ ID NO: 29145 - protein, 13 aa, BK virus
FSLKELHQDSHSS

SEQ ID NO: 29146 - protein, 13 aa, BK virus
SLKELHQDSHSSV

SEQ ID NO: 29147 - protein, 13 aa, BK virus
LKELHQDSHSSVP

SEQ ID NO: 29148 - protein, 13 aa, BK virus
VGTYKKNNYLGPF

SEQ ID NO: 29149 - protein, 13 aa, BK virus
GTYKKNNYLGPFN

SEQ ID NO: 29150 - protein, 13 aa, BK virus
TYKKNNYLGPFNI

SEQ ID NO: 29151 - protein, 13 aa, BK virus
YKKNNYLGPFNIL

SEQ ID NO: 29152 - protein, 13 aa, BK virus
KKNNYLGPFNILL

SEQ ID NO: 29153 - protein, 13 aa, BK virus
KNNYLGPFNILLF

SEQ ID NO: 29154 - protein, 13 aa, BK virus
NNYLGPFNILLFI

SEQ ID NO: 29155 - protein, 13 aa, BK virus
REFLQLFGPTIAE

SEQ ID NO: 29156 - protein, 13 aa, BK virus
EFLQLFGPTIAEF

SEQ ID NO: 29157 - protein, 13 aa, BK virus
FLQLFGPTIAEFL

SEQ ID NO: 29158 - protein, 13 aa, BK virus
LQLFGPTIAEFLQ

SEQ ID NO: 29159 - protein, 13 aa, BK virus
QLFGPTIAEFLQL

SEQ ID NO: 29160 - protein, 13 aa, BK virus
LFGPTIAEFLQLG

SEQ ID NO: 29161 - protein, 13 aa, BK virus
FGPTIAEFLQLGL

SEQ ID NO: 29162 - protein, 13 aa, BK virus
GPTIAEFLQLGLS

SEQ ID NO: 29163 - protein, 13 aa, BK virus
PTIAEFLQLGLSQ

SEQ ID NO: 29164 - protein, 13 aa, BK virus
TIAEFLQLGLSQT

SEQ ID NO: 29165 - protein, 13 aa, BK virus
IAEFLQLGLSQTT

SEQ ID NO: 29166 - protein, 13 aa, BK virus
AEFLQLGLSQTTV

SEQ ID NO: 29167 - protein, 13 aa, BK virus
SSQCSSNLSKPRA

SEQ ID NO: 29168 - protein, 13 aa, BK virus
SQCSSNLSKPRAL

SEQ ID NO: 29169 - protein, 13 aa, BK virus
QCSSNLSKPRALF

SEQ ID NO: 29170 - protein, 13 aa, BK virus
CSSNLSKPRALFL

SEQ ID NO: 29171 - protein, 13 aa, BK virus
SSNLSKPRALFLK

SEQ ID NO: 29172 - protein, 13 aa, BK virus
SNLSKPRALFLKI

SEQ ID NO: 29173 - protein, 13 aa, BK virus
NLSKPRALFLKIF

SEQ ID NO: 29174 - protein, 13 aa, BK virus
LSKPRALFLKIFY

SEQ ID NO: 29175 - protein, 13 aa, BK virus
SKPRALFLKIFYL

SEQ ID NO: 29176 - protein, 13 aa, BK virus
KPRALFLKIFYLN

SEQ ID NO: 29177 - protein, 13 aa, BK virus
PRALFLKIFYLNA

SEQ ID NO: 29178 - protein, 13 aa, BK virus
RALFLKIFYLNAL

SEQ ID NO: 29179 - protein, 13 aa, BK virus
ALFLKIFYLNALI

SEQ ID NO: 29180 - protein, 13 aa, BK virus
ADIACKGSAQKAF

SEQ ID NO: 29181 - protein, 13 aa, BK virus
DIACKGSAQKAFW

SEQ ID NO: 29182 - protein, 13 aa, BK virus
IACKGSAQKAFWN

SEQ ID NO: 29183 - protein, 13 aa, BK virus
ACKGSAQKAFWNK

SEQ ID NO: 29184 - protein, 13 aa, BK virus
AIPCSTGYLGKEE

SEQ ID NO: 29185 - protein, 13 aa, BK virus
IPCSTGYLGKEEN

SEQ ID NO: 29186 - protein, 13 aa, BK virus
PCSTGYLGKEENQ

SEQ ID NO: 29187 - protein, 13 aa, BK virus
CSTGYLGKEENQH

SEQ ID NO: 29188 - protein, 13 aa, BK virus
STGYLGKEENQHK

SEQ ID NO: 29189 - protein, 13 aa, BK virus
TGYLGKEENQHKP

SEQ ID NO: 29190 - protein, 13 aa, BK virus
GYLGKEENQHKPL

SEQ ID NO: 29191 - protein, 13 aa, BK virus
YLGKEENQHKPLS

SEQ ID NO: 29192 - protein, 13 aa, BK virus
LGKEENQHKPLSY

SEQ ID NO: 29193 - protein, 13 aa, BK virus
GKEENQHKPLSYS

SEQ ID NO: 29194 - protein, 13 aa, BK virus
KEENQHKPLSYSR

SEQ ID NO: 29195 - protein, 13 aa, BK virus
EENQHKPLSYSRF

SEQ ID NO: 29196 - protein, 13 aa, BK virus
ENQHKPLSYSRFQ

SEQ ID NO: 29197 - protein, 13 aa, BK virus
NQHKPLSYSRFQN

SEQ ID NO: 29198 - protein, 13 aa, BK virus
QHKPLSYSRFQNQ

SEQ ID NO: 29199 - protein, 13 aa, BK virus
HKPLSYSRFQNQA

SEQ ID NO: 29200 - protein, 13 aa, BK virus
KPLSYSRFQNQAD

SEQ ID NO: 29201 - protein, 13 aa, BK virus
PLSYSRFQNQADE

SEQ ID NO: 29202 - protein, 13 aa, BK virus
LSYSRFQNQADEL

SEQ ID NO: 29203 - protein, 13 aa, BK virus
SYSRFQNQADELP

SEQ ID NO: 29204 - protein, 13 aa, BK virus
YSRFQNQADELPL

SEQ ID NO: 29205 - protein, 13 aa, BK virus
SRFQNQADELPLH

SEQ ID NO: 29206 - protein, 13 aa, BK virus
RFQNQADELPLHP

SEQ ID NO: 29207 - protein, 13 aa, BK virus
FQNQADELPLHPA

SEQ ID NO: 29208 - protein, 13 aa, BK virus
QNQADELPLHPAP

SEQ ID NO: 29209 - protein, 13 aa, BK virus
NQADELPLHPAPF

SEQ ID NO: 29210 - protein, 13 aa, BK virus
QADELPLHPAPFF

SEQ ID NO: 29211 - protein, 13 aa, BK virus
ADELPLHPAPFFY

SEQ ID NO: 29212 - protein, 13 aa, BK virus
DELPLHPAPFFYT

SEQ ID NO: 29213 - protein, 13 aa, BK virus
ELPLHPAPFFYTK

SEQ ID NO: 29214 - protein, 13 aa, BK virus
LPLHPAPFFYTKY

SEQ ID NO: 29215 - protein, 13 aa, BK virus
PLHPAPFFYTKYS

SEQ ID NO: 29216 - protein, 13 aa, BK virus
LHPAPFFYTKYSF

SEQ ID NO: 29217 - protein, 13 aa, BK virus
HPAPFFYTKYSFS

SEQ ID NO: 29218 - protein, 13 aa, BK virus
PAPFFYTKYSFSS

SEQ ID NO: 29219 - protein, 13 aa, BK virus
APFFYTKYSFSSF

SEQ ID NO: 29220 - protein, 13 aa, BK virus
PFFYTKYSFSSFY

SEQ ID NO: 29221 - protein, 13 aa, BK virus
FFYTKYSFSSFYP

SEQ ID NO: 29222 - protein, 13 aa, BK virus
FYTKYSFSSFYPR

SEQ ID NO: 29223 - protein, 13 aa, BK virus
YTKYSFSSFYPRR

SEQ ID NO: 29224 - protein, 13 aa, BK virus
TKYSFSSFYPRRP

SEQ ID NO: 29225 - protein, 13 aa, BK virus
KYSFSSFYPRRPL

SEQ ID NO: 29226 - protein, 13 aa, BK virus
YSFSSFYPRRPLC

SEQ ID NO: 29227 - protein, 13 aa, BK virus
SFSSFYPRRPLCQ

SEQ ID NO: 29228 - protein, 13 aa, BK virus
FSSFYPRRPLCQG

SEQ ID NO: 29229 - protein, 13 aa, BK virus
SSFYPRRPLCQGE

SEQ ID NO: 29230 - protein, 13 aa, BK virus
SFYPRRPLCQGEI

SEQ ID NO: 29231 - protein, 13 aa, BK virus
FYPRRPLCQGEIP

SEQ ID NO: 29232 - protein, 13 aa, BK virus
YPRRPLCQGEIPY

SEQ ID NO: 29233 - protein, 13 aa, BK virus
PRRPLCQGEIPYT

SEQ ID NO: 29234 - protein, 13 aa, BK virus
RRPLCQGEIPYTS

SEQ ID NO: 29235 - protein, 13 aa, BK virus
RPLCQGEIPYTSL

SEQ ID NO: 29236 - protein, 13 aa, BK virus
PLCQGEIPYTSLN

SEQ ID NO: 29237 - protein, 13 aa, BK virus
LCQGEIPYTSLNK

SEQ ID NO: 29238 - protein, 13 aa, BK virus
CQGEIPYTSLNKL

SEQ ID NO: 29239 - protein, 13 aa, BK virus
QGEIPYTSLNKLF

SEQ ID NO: 29240 - protein, 13 aa, BK virus
GEIPYTSLNKLFS

SEQ ID NO: 29241 - protein, 13 aa, BK virus
EIPYTSLNKLFSL

SEQ ID NO: 29242 - protein, 13 aa, BK virus
IPYTSLNKLFSLR

SEQ ID NO: 29243 - protein, 13 aa, BK virus
PYTSLNKLFSLRE

SEQ ID NO: 29244 - protein, 13 aa, BK virus
YTSLNKLFSLRED

SEQ ID NO: 29245 - protein, 13 aa, BK virus
TSLNKLFSLREDF

SEQ ID NO: 29246 - protein, 13 aa, BK virus
SLNKLFSLREDFP

SEQ ID NO: 29247 - protein, 13 aa, BK virus
LNKLFSLREDFPR

SEQ ID NO: 29248 - protein, 13 aa, BK virus
NKLFSLREDFPRQ

SEQ ID NO: 29249 - protein, 13 aa, BK virus
KLFSLREDFPRQL

SEQ ID NO: 29250 - protein, 13 aa, BK virus
LFSLREDFPRQLF

SEQ ID NO: 29251 - protein, 13 aa, BK virus
FSLREDFPRQLFQ

SEQ ID NO: 29252 - protein, 13 aa, BK virus
SLREDFPRQLFQG

SEQ ID NO: 29253 - protein, 13 aa, BK virus
LREDFPRQLFQGL

SEQ ID NO: 29254 - protein, 13 aa, BK virus
REDFPRQLFQGLK

SEQ ID NO: 29255 - protein, 13 aa, BK virus
EDFPRQLFQGLKG

SEQ ID NO: 29256 - protein, 13 aa, BK virus
DFPRQLFQGLKGP

SEQ ID NO: 29257 - protein, 14 aa, BK virus
GFPQIVLLGLRKSL

SEQ ID NO: 29258 - protein, 14 aa, BK virus
FPQIVLLGLRKSLH

SEQ ID NO: 29259 - protein, 14 aa, BK virus
PQIVLLGLRKSLHT

SEQ ID NO: 29260 - protein, 14 aa, BK virus
QIVLLGLRKSLHTL

SEQ ID NO: 29261 - protein, 14 aa, BK virus
IVLLGLRKSLHTLT

SEQ ID NO: 29262 - protein, 14 aa, BK virus
VLLGLRKSLHTLTT

SEQ ID NO: 29263 - protein, 14 aa, BK virus
EKGWRQRRPRPLIY

SEQ ID NO: 29264 - protein, 14 aa, BK virus
KGWRQRRPRPLIYY

SEQ ID NO: 29265 - protein, 14 aa, BK virus
GWRQRRPRPLIYYK

SEQ ID NO: 29266 - protein, 14 aa, BK virus
WRQRRPRPLIYYKK

SEQ ID NO: 29267 - protein, 14 aa, BK virus
RQRRPRPLIYYKKK

SEQ ID NO: 29268 - protein, 14 aa, BK virus
QRRPRPLIYYKKKG

SEQ ID NO: 29269 - protein, 14 aa, BK virus
RRPRPLIYYKKKGH

SEQ ID NO: 29270 - protein, 14 aa, BK virus
RPRPLIYYKKKGHR

SEQ ID NO: 29271 - protein, 14 aa, BK virus
PRPLIYYKKKGHRE

SEQ ID NO: 29272 - protein, 14 aa, BK virus
RPLIYYKKKGHREE

SEQ ID NO: 29273 - protein, 14 aa, BK virus
PLIYYKKKGHREEL

SEQ ID NO: 29274 - protein, 14 aa, BK virus
LIYYKKKGHREELL

SEQ ID NO: 29275 - protein, 14 aa, BK virus
IYYKKKGHREELLT

SEQ ID NO: 29276 - protein, 14 aa, BK virus
YYKKKGHREELLTH

SEQ ID NO: 29277 - protein, 14 aa, BK virus
YKKKGHREELLTHG

SEQ ID NO: 29278 - protein, 14 aa, BK virus
KKKGHREELLTHGM

SEQ ID NO: 29279 - protein, 14 aa, BK virus
KKGHREELLTHGMQ

SEQ ID NO: 29280 - protein, 14 aa, BK virus
KGHREELLTHGMQP

SEQ ID NO: 29281 - protein, 14 aa, BK virus
GHREELLTHGMQPN

SEQ ID NO: 29282 - protein, 14 aa, BK virus
HREELLTHGMQPNH

SEQ ID NO: 29283 - protein, 14 aa, BK virus
REELLTHGMQPNHD

SEQ ID NO: 29284 - protein, 14 aa, BK virus
EELLTHGMQPNHDL

SEQ ID NO: 29285 - protein, 14 aa, BK virus
ELLTHGMQPNHDLR

SEQ ID NO: 29286 - protein, 14 aa, BK virus
LLTHGMQPNHDLRK

SEQ ID NO: 29287 - protein, 14 aa, BK virus
LTHGMQPNHDLRKE

SEQ ID NO: 29288 - protein, 14 aa, BK virus
THGMQPNHDLRKES

SEQ ID NO: 29289 - protein, 14 aa, BK virus
HGMQPNHDLRKESA

SEQ ID NO: 29290 - protein, 14 aa, BK virus
LTGECSQTMTSGRK

SEQ ID NO: 29291 - protein, 14 aa, BK virus
TGECSQTMTSGRKV

SEQ ID NO: 29292 - protein, 14 aa, BK virus
GECSQTMTSGRKVH

SEQ ID NO: 29293 - protein, 14 aa, BK virus
ECSQTMTSGRKVHD

SEQ ID NO: 29294 - protein, 14 aa, BK virus
CSQTMTSGRKVHDS

SEQ ID NO: 29295 - protein, 14 aa, BK virus
SQTMTSGRKVHDSQ

SEQ ID NO: 29296 - protein, 14 aa, BK virus
QTMTSGRKVHDSQG

SEQ ID NO: 29297 - protein, 14 aa, BK virus
TMTSGRKVHDSQGG

SEQ ID NO: 29298 - protein, 14 aa, BK virus
MTSGRKVHDSQGGA

SEQ ID NO: 29299 - protein, 14 aa, BK virus
TSGRKVHDSQGGAA

SEQ ID NO: 29300 - protein, 14 aa, BK virus
SGRKVHDSQGGAAY

SEQ ID NO: 29301 - protein, 14 aa, BK virus
GRKVHDSQGGAAYP

SEQ ID NO: 29302 - protein, 14 aa, BK virus
RKVHDSQGGAAYPW

SEQ ID NO: 29303 - protein, 14 aa, BK virus
KVHDSQGGAAYPWN

SEQ ID NO: 29304 - protein, 14 aa, BK virus
VHDSQGGAAYPWNA

SEQ ID NO: 29305 - protein, 14 aa, BK virus
HDSQGGAAYPWNAA

SEQ ID NO: 29306 - protein, 14 aa, BK virus
DSQGGAAYPWNAAK

SEQ ID NO: 29307 - protein, 14 aa, BK virus
SQGGAAYPWNAAKP

SEQ ID NO: 29308 - protein, 14 aa, BK virus
PQEGKCMTDMFCEP

SEQ ID NO: 29309 - protein, 14 aa, BK virus
QEGKCMTDMFCEPR

SEQ ID NO: 29310 - protein, 14 aa, BK virus
EGKCMTDMFCEPRN

SEQ ID NO: 29311 - protein, 14 aa, BK virus
GKCMTDMFCEPRNL

SEQ ID NO: 29312 - protein, 14 aa, BK virus
KCMTDMFCEPRNLG

SEQ ID NO: 29313 - protein, 14 aa, BK virus
CMTDMFCEPRNLGL

SEQ ID NO: 29314 - protein, 14 aa, BK virus
MTDMFCEPRNLGLV

SEQ ID NO: 29315 - protein, 14 aa, BK virus
TDMFCEPRNLGLVP

SEQ ID NO: 29316 - protein, 14 aa, BK virus
DMFCEPRNLGLVPS

SEQ ID NO: 29317 - protein, 14 aa, BK virus
TGQRPWFCASCHDK

SEQ ID NO: 29318 - protein, 14 aa, BK virus
GQRPWFCASCHDKL

SEQ ID NO: 29319 - protein, 14 aa, BK virus
QRPWFCASCHDKLQ

SEQ ID NO: 29320 - protein, 14 aa, BK virus
KLVKPGLEQKKELR

SEQ ID NO: 29321 - protein, 14 aa, BK virus
LVKPGLEQKKELRG

SEQ ID NO: 29322 - protein, 14 aa, BK virus
VKPGLEQKKELRGF

SEQ ID NO: 29323 - protein, 14 aa, BK virus
KPGLEQKKELRGFL

SEQ ID NO: 29324 - protein, 14 aa, BK virus
PGLEQKKELRGFLF

SEQ ID NO: 29325 - protein, 14 aa, BK virus
GLEQKKELRGFLFL

SEQ ID NO: 29326 - protein, 14 aa, BK virus
LEQKKELRGFLFLF

SEQ ID NO: 29327 - protein, 14 aa, BK virus
VIPFFLYFQVHGCC

SEQ ID NO: 29328 - protein, 14 aa, BK virus
IPFFLYFQVHGCCS

SEQ ID NO: 29329 - protein, 14 aa, BK virus
PFFLYFQVHGCCSS

SEQ ID NO: 29330 - protein, 14 aa, BK virus
FFLYFQVHGCCSST

SEQ ID NO: 29331 - protein, 14 aa, BK virus
FLYFQVHGCCSSTF

SEQ ID NO: 29332 - protein, 14 aa, BK virus
LYFQVHGCCSSTFG

SEQ ID NO: 29333 - protein, 14 aa, BK virus
YFQVHGCCSSTFGG

SEQ ID NO: 29334 - protein, 14 aa, BK virus
FQVHGCCSSTFGGP

SEQ ID NO: 29335 - protein, 14 aa, BK virus
QVHGCCSSTFGGPS

SEQ ID NO: 29336 - protein, 14 aa, BK virus
VHGCCSSTFGGPSC

SEQ ID NO: 29337 - protein, 14 aa, BK virus
HGCCSSTFGGPSCQ

SEQ ID NO: 29338 - protein, 14 aa, BK virus
GCCSSTFGGPSCQC

SEQ ID NO: 29339 - protein, 14 aa, BK virus
CCSSTFGGPSCQCI

SEQ ID NO: 29340 - protein, 14 aa, BK virus
NCCWGGCCCYRSSN

SEQ ID NO: 29341 - protein, 14 aa, BK virus
CCWGGCCCYRSSNC

SEQ ID NO: 29342 - protein, 14 aa, BK virus
CWGGCCCYRSSNCI

SEQ ID NO: 29343 - protein, 14 aa, BK virus
WGGCCCYRSSNCIP

SEQ ID NO: 29344 - protein, 14 aa, BK virus
GGCCCYRSSNCIPC

SEQ ID NO: 29345 - protein, 14 aa, BK virus
GCCCYRSSNCIPCY

SEQ ID NO: 29346 - protein, 14 aa, BK virus
CCCYRSSNCIPCYC

SEQ ID NO: 29347 - protein, 14 aa, BK virus
CCYRSSNCIPCYCR

SEQ ID NO: 29348 - protein, 14 aa, BK virus
CYRSSNCIPCYCRG

SEQ ID NO: 29349 - protein, 14 aa, BK virus
YRSSNCIPCYCRGH

SEQ ID NO: 29350 - protein, 14 aa, BK virus
RSSNCIPCYCRGHN

SEQ ID NO: 29351 - protein, 14 aa, BK virus
SSNCIPCYCRGHNK

SEQ ID NO: 29352 - protein, 14 aa, BK virus
SNCIPCYCRGHNKY

SEQ ID NO: 29353 - protein, 14 aa, BK virus
NCIPCYCRGHNKYL

SEQ ID NO: 29354 - protein, 14 aa, BK virus
CIPCYCRGHNKYLR

SEQ ID NO: 29355 - protein, 14 aa, BK virus
IPCYCRGHNKYLRG

SEQ ID NO: 29356 - protein, 14 aa, BK virus
PCYCRGHNKYLRGY

SEQ ID NO: 29357 - protein, 14 aa, BK virus
CYCRGHNKYLRGYS

SEQ ID NO: 29358 - protein, 14 aa, BK virus
YCRGHNKYLRGYSC

SEQ ID NO: 29359 - protein, 14 aa, BK virus
CRGHNKYLRGYSCY

SEQ ID NO: 29360 - protein, 14 aa, BK virus
RGHNKYLRGYSCYR

SEQ ID NO: 29361 - protein, 14 aa, BK virus
GHNKYLRGYSCYRP

SEQ ID NO: 29362 - protein, 14 aa, BK virus
HNKYLRGYSCYRPN

SEQ ID NO: 29363 - protein, 14 aa, BK virus
NKYLRGYSCYRPNS

SEQ ID NO: 29364 - protein, 14 aa, BK virus
KYLRGYSCYRPNSS

SEQ ID NO: 29365 - protein, 14 aa, BK virus
YLRGYSCYRPNSSN

SEQ ID NO: 29366 - protein, 14 aa, BK virus
LRGYSCYRPNSSNI

SEQ ID NO: 29367 - protein, 14 aa, BK virus
RGYSCYRPNSSNIC

SEQ ID NO: 29368 - protein, 14 aa, BK virus
GYSCYRPNSSNICC

SEQ ID NO: 29369 - protein, 14 aa, BK virus
YSCYRPNSSNICCN

SEQ ID NO: 29370 - protein, 14 aa, BK virus
SCYRPNSSNICCNC

SEQ ID NO: 29371 - protein, 14 aa, BK virus
CYRPNSSNICCNCW

SEQ ID NO: 29372 - protein, 14 aa, BK virus
YRPNSSNICCNCWC

SEQ ID NO: 29373 - protein, 14 aa, BK virus
RPNSSNICCNCWCS

SEQ ID NO: 29374 - protein, 14 aa, BK virus
PNSSNICCNCWCSW

SEQ ID NO: 29375 - protein, 14 aa, BK virus
NSSNICCNCWCSWG

SEQ ID NO: 29376 - protein, 14 aa, BK virus
SSNICCNCWCSWGY

SEQ ID NO: 29377 - protein, 14 aa, BK virus
SNICCNCWCSWGYC

SEQ ID NO: 29378 - protein, 14 aa, BK virus
NICCNCWCSWGYCW

SEQ ID NO: 29379 - protein, 14 aa, BK virus
ICCNCWCSWGYCWV

SEQ ID NO: 29380 - protein, 14 aa, BK virus
CCNCWCSWGYCWVC

SEQ ID NO: 29381 - protein, 14 aa, BK virus
CNCWCSWGYCWVCC

SEQ ID NO: 29382 - protein, 14 aa, BK virus
NCWCSWGYCWVCCF

SEQ ID NO: 29383 - protein, 14 aa, BK virus
CWCSWGYCWVCCFN

SEQ ID NO: 29384 - protein, 14 aa, BK virus
WCSWGYCWVCCFNS

SEQ ID NO: 29385 - protein, 14 aa, BK virus
CSWGYCWVCCFNSN

SEQ ID NO: 29386 - protein, 14 aa, BK virus
SWGYCWVCCFNSNC

SEQ ID NO: 29387 - protein, 14 aa, BK virus
LGSQSFHCRPLSAI

SEQ ID NO: 29388 - protein, 14 aa, BK virus
GSQSFHCRPLSAIR

SEQ ID NO: 29389 - protein, 14 aa, BK virus
SQSFHCRPLSAIRH

SEQ ID NO: 29390 - protein, 14 aa, BK virus
QSFHCRPLSAIRHG

SEQ ID NO: 29391 - protein, 14 aa, BK virus
SFHCRPLSAIRHGF

SEQ ID NO: 29392 - protein, 14 aa, BK virus
FHCRPLSAIRHGFG

SEQ ID NO: 29393 - protein, 14 aa, BK virus
HCRPLSAIRHGFGI

SEQ ID NO: 29394 - protein, 14 aa, BK virus
CRPLSAIRHGFGIV

SEQ ID NO: 29395 - protein, 14 aa, BK virus
ALGSFFVCYYFPGF

SEQ ID NO: 29396 - protein, 14 aa, BK virus
LGSFFVCYYFPGFV

SEQ ID NO: 29397 - protein, 14 aa, BK virus
GSFFVCYYFPGFVA

SEQ ID NO: 29398 - protein, 14 aa, BK virus
SFFVCYYFPGFVAC

SEQ ID NO: 29399 - protein, 14 aa, BK virus
FFVCYYFPGFVACY

SEQ ID NO: 29400 - protein, 14 aa, BK virus
YTFYNLTGIAEKNR

SEQ ID NO: 29401 - protein, 14 aa, BK virus
TFYNLTGIAEKNRK

SEQ ID NO: 29402 - protein, 14 aa, BK virus
FYNLTGIAEKNRKI

SEQ ID NO: 29403 - protein, 14 aa, BK virus
YNLTGIAEKNRKIF

SEQ ID NO: 29404 - protein, 14 aa, BK virus
IFGGNYLDNCKCPY

SEQ ID NO: 29405 - protein, 14 aa, BK virus
FGGNYLDNCKCPYK

SEQ ID NO: 29406 - protein, 14 aa, BK virus
GGNYLDNCKCPYKL

SEQ ID NO: 29407 - protein, 14 aa, BK virus
GNYLDNCKCPYKLL

SEQ ID NO: 29408 - protein, 14 aa, BK virus
QYRRSYTKNGLKKS

SEQ ID NO: 29409 - protein, 14 aa, BK virus
YRRSYTKNGLKKST

SEQ ID NO: 29410 - protein, 14 aa, BK virus
RRSYTKNGLKKSTK

SEQ ID NO: 29411 - protein, 14 aa, BK virus
RSYTKNGLKKSTKC

SEQ ID NO: 29412 - protein, 14 aa, BK virus
SYTKNGLKKSTKCT

SEQ ID NO: 29413 - protein, 14 aa, BK virus
YTKNGLKKSTKCTF

SEQ ID NO: 29414 - protein, 14 aa, BK virus
TKNGLKKSTKCTFR

SEQ ID NO: 29415 - protein, 14 aa, BK virus
KNGLKKSTKCTFRR

SEQ ID NO: 29416 - protein, 14 aa, BK virus
NGLKKSTKCTFRRV

SEQ ID NO: 29417 - protein, 14 aa, BK virus
GLKKSTKCTFRRVY

SEQ ID NO: 29418 - protein, 14 aa, BK virus
LKKSTKCTFRRVYR

SEQ ID NO: 29419 - protein, 14 aa, BK virus
KKSTKCTFRRVYRK

SEQ ID NO: 29420 - protein, 14 aa, BK virus
KSTKCTFRRVYRKN

SEQ ID NO: 29421 - protein, 14 aa, BK virus
STKCTFRRVYRKNY

SEQ ID NO: 29422 - protein, 14 aa, BK virus
TKCTFRRVYRKNYC

SEQ ID NO: 29423 - protein, 14 aa, BK virus
KCTFRRVYRKNYCP

SEQ ID NO: 29424 - protein, 14 aa, BK virus
CTFRRVYRKNYCPR

SEQ ID NO: 29425 - protein, 14 aa, BK virus
TFRRVYRKNYCPRR

SEQ ID NO: 29426 - protein, 14 aa, BK virus
FRRVYRKNYCPRRC

SEQ ID NO: 29427 - protein, 14 aa, BK virus
SKNCSSMDVAFTSR

SEQ ID NO: 29428 - protein, 14 aa, BK virus
KNCSSMDVAFTSRP

SEQ ID NO: 29429 - protein, 14 aa, BK virus
NCSSMDVAFTSRPV

SEQ ID NO: 29430 - protein, 14 aa, BK virus
CSSMDVAFTSRPVR

SEQ ID NO: 29431 - protein, 14 aa, BK virus
SSMDVAFTSRPVRD

SEQ ID NO: 29432 - protein, 14 aa, BK virus
SMDVAFTSRPVRDC

SEQ ID NO: 29433 - protein, 14 aa, BK virus
MDVAFTSRPVRDCN

SEQ ID NO: 29434 - protein, 14 aa, BK virus
DVAFTSRPVRDCNT

SEQ ID NO: 29435 - protein, 14 aa, BK virus
VAFTSRPVRDCNTC

SEQ ID NO: 29436 - protein, 14 aa, BK virus
AFTSRPVRDCNTCS

SEQ ID NO: 29437 - protein, 14 aa, BK virus
RWPQPKEKESVQGQ

SEQ ID NO: 29438 - protein, 14 aa, BK virus
WPQPKEKESVQGQL

SEQ ID NO: 29439 - protein, 14 aa, BK virus
PQPKEKESVQGQLP

SEQ ID NO: 29440 - protein, 14 aa, BK virus
QPKEKESVQGQLPK

SEQ ID NO: 29441 - protein, 14 aa, BK virus
PKEKESVQGQLPKS

SEQ ID NO: 29442 - protein, 14 aa, BK virus
KEKESVQGQLPKSQ

SEQ ID NO: 29443 - protein, 14 aa, BK virus
EKESVQGQLPKSQR

SEQ ID NO: 29444 - protein, 14 aa, BK virus
KESVQGQLPKSQRN

SEQ ID NO: 29445 - protein, 14 aa, BK virus
ESVQGQLPKSQRNP

SEQ ID NO: 29446 - protein, 14 aa, BK virus
SVQGQLPKSQRNPC

SEQ ID NO: 29447 - protein, 14 aa, BK virus
VQGQLPKSQRNPCK

SEQ ID NO: 29448 - protein, 14 aa, BK virus
QGQLPKSQRNPCKC

SEQ ID NO: 29449 - protein, 14 aa, BK virus
GQLPKSQRNPCKCQ

SEQ ID NO: 29450 - protein, 14 aa, BK virus
QLPKSQRNPCKCQN

SEQ ID NO: 29451 - protein, 14 aa, BK virus
LPKSQRNPCKCQNY

SEQ ID NO: 29452 - protein, 14 aa, BK virus
TQKWGIQMKTLGAL

SEQ ID NO: 29453 - protein, 14 aa, BK virus
QKWGIQMKTLGALV

SEQ ID NO: 29454 - protein, 14 aa, BK virus
VLKMTLAVIAQREK

SEQ ID NO: 29455 - protein, 14 aa, BK virus
LKMTLAVIAQREKC

SEQ ID NO: 29456 - protein, 14 aa, BK virus
KMTLAVIAQREKCF

SEQ ID NO: 29457 - protein, 14 aa, BK virus
MTLAVIAQREKCFP

SEQ ID NO: 29458 - protein, 14 aa, BK virus
TLAVIAQREKCFPV

SEQ ID NO: 29459 - protein, 14 aa, BK virus
LAVIAQREKCFPVT

SEQ ID NO: 29460 - protein, 14 aa, BK virus
AVIAQREKCFPVTA

SEQ ID NO: 29461 - protein, 14 aa, BK virus
VIAQREKCFPVTAQ

SEQ ID NO: 29462 - protein, 14 aa, BK virus
IAQREKCFPVTAQQ

SEQ ID NO: 29463 - protein, 14 aa, BK virus
AQREKCFPVTAQQE

SEQ ID NO: 29464 - protein, 14 aa, BK virus
QREKCFPVTAQQEF

SEQ ID NO: 29465 - protein, 14 aa, BK virus
REKCFPVTAQQEFP

SEQ ID NO: 29466 - protein, 14 aa, BK virus
EKCFPVTAQQEFPS

SEQ ID NO: 29467 - protein, 14 aa, BK virus
KCFPVTAQQEFPSP

SEQ ID NO: 29468 - protein, 14 aa, BK virus
CFPVTAQQEFPSPI

SEQ ID NO: 29469 - protein, 14 aa, BK virus
LACLTFMQGHKKCM

SEQ ID NO: 29470 - protein, 14 aa, BK virus
ACLTFMQGHKKCMS

SEQ ID NO: 29471 - protein, 14 aa, BK virus
CLTFMQGHKKCMSM

SEQ ID NO: 29472 - protein, 14 aa, BK virus
LTFMQGHKKCMSMV

SEQ ID NO: 29473 - protein, 14 aa, BK virus
TFMQGHKKCMSMVE

SEQ ID NO: 29474 - protein, 14 aa, BK virus
FMQGHKKCMSMVEE

SEQ ID NO: 29475 - protein, 14 aa, BK virus
MQGHKKCMSMVEEN

SEQ ID NO: 29476 - protein, 14 aa, BK virus
QGHKKCMSMVEENL

SEQ ID NO: 29477 - protein, 14 aa, BK virus
GHKKCMSMVEENLF

SEQ ID NO: 29478 - protein, 14 aa, BK virus
HKKCMSMVEENLFK

SEQ ID NO: 29479 - protein, 14 aa, BK virus
KKCMSMVEENLFKA

SEQ ID NO: 29480 - protein, 14 aa, BK virus
KCMSMVEENLFKAV

SEQ ID NO: 29481 - protein, 14 aa, BK virus
CMSMVEENLFKAVI

SEQ ID NO: 29482 - protein, 14 aa, BK virus
MSMVEENLFKAVIS

SEQ ID NO: 29483 - protein, 14 aa, BK virus
SMVEENLFKAVIST

SEQ ID NO: 29484 - protein, 14 aa, BK virus
MVEENLFKAVISTS

SEQ ID NO: 29485 - protein, 14 aa, BK virus
VEENLFKAVISTSL

SEQ ID NO: 29486 - protein, 14 aa, BK virus
EENLFKAVISTSLL

SEQ ID NO: 29487 - protein, 14 aa, BK virus
ILTIRPIWTKTMLI

SEQ ID NO: 29488 - protein, 14 aa, BK virus
LTIRPIWTKTMLIQ

SEQ ID NO: 29489 - protein, 14 aa, BK virus
TIRPIWTKTMLIQL

SEQ ID NO: 29490 - protein, 14 aa, BK virus
IRPIWTKTMLIQLS

SEQ ID NO: 29491 - protein, 14 aa, BK virus
RPIWTKTMLIQLSA

SEQ ID NO: 29492 - protein, 14 aa, BK virus
PIWTKTMLIQLSAG

SEQ ID NO: 29493 - protein, 14 aa, BK virus
IWTKTMLIQLSAGY

SEQ ID NO: 29494 - protein, 14 aa, BK virus
WTKTMLIQLSAGYL

SEQ ID NO: 29495 - protein, 14 aa, BK virus
TKTMLIQLSAGYLI

SEQ ID NO: 29496 - protein, 14 aa, BK virus
KTMLIQLSAGYLIP

SEQ ID NO: 29497 - protein, 14 aa, BK virus
TMLIQLSAGYLIPV

SEQ ID NO: 29498 - protein, 14 aa, BK virus
MLIQLSAGYLIPVE

SEQ ID NO: 29499 - protein, 14 aa, BK virus
LIQLSAGYLIPVEM

SEQ ID NO: 29500 - protein, 14 aa, BK virus
IQLSAGYLIPVEMK

SEQ ID NO: 29501 - protein, 14 aa, BK virus
QLSAGYLIPVEMKM

SEQ ID NO: 29502 - protein, 14 aa, BK virus
LSAGYLIPVEMKML

SEQ ID NO: 29503 - protein, 14 aa, BK virus
SAGYLIPVEMKMLG

SEQ ID NO: 29504 - protein, 14 aa, BK virus
AGYLIPVEMKMLGI

SEQ ID NO: 29505 - protein, 14 aa, BK virus
GYLIPVEMKMLGIL

SEQ ID NO: 29506 - protein, 14 aa, BK virus
YLIPVEMKMLGILG

SEQ ID NO: 29507 - protein, 14 aa, BK virus
LIPVEMKMLGILGL

SEQ ID NO: 29508 - protein, 14 aa, BK virus
IPVEMKMLGILGLS

SEQ ID NO: 29509 - protein, 14 aa, BK virus
PVEMKMLGILGLSQ

SEQ ID NO: 29510 - protein, 14 aa, BK virus
VEMKMLGILGLSQE

SEQ ID NO: 29511 - protein, 14 aa, BK virus
EMKMLGILGLSQEG

SEQ ID NO: 29512 - protein, 14 aa, BK virus
MKMLGILGLSQEGK

SEQ ID NO: 29513 - protein, 14 aa, BK virus
KMLGILGLSQEGKM

SEQ ID NO: 29514 - protein, 14 aa, BK virus
MLGILGLSQEGKMF

SEQ ID NO: 29515 - protein, 14 aa, BK virus
LGILGLSQEGKMFP

SEQ ID NO: 29516 - protein, 14 aa, BK virus
GILGLSQEGKMFPQ

SEQ ID NO: 29517 - protein, 14 aa, BK virus
ILGLSQEGKMFPQY

SEQ ID NO: 29518 - protein, 14 aa, BK virus
LGLSQEGKMFPQYF

SEQ ID NO: 29519 - protein, 14 aa, BK virus
GLSQEGKMFPQYFM

SEQ ID NO: 29520 - protein, 14 aa, BK virus
MNRVWGLFVKLIAC

SEQ ID NO: 29521 - protein, 14 aa, BK virus
NRVWGLFVKLIACM

SEQ ID NO: 29522 - protein, 14 aa, BK virus
RVWGLFVKLIACMF

SEQ ID NO: 29523 - protein, 14 aa, BK virus
VWGLFVKLIACMFQ

SEQ ID NO: 29524 - protein, 14 aa, BK virus
WGLFVKLIACMFQL

SEQ ID NO: 29525 - protein, 14 aa, BK virus
GLFVKLIACMFQLL

SEQ ID NO: 29526 - protein, 14 aa, BK virus
LFVKLIACMFQLLI

SEQ ID NO: 29527 - protein, 14 aa, BK virus
FVKLIACMFQLLIF

SEQ ID NO: 29528 - protein, 14 aa, BK virus
VKLIACMFQLLIFV

SEQ ID NO: 29529 - protein, 14 aa, BK virus
KLIACMFQLLIFVA

SEQ ID NO: 29530 - protein, 14 aa, BK virus
LIACMFQLLIFVAC

SEQ ID NO: 29531 - protein, 14 aa, BK virus
IACMFQLLIFVACL

SEQ ID NO: 29532 - protein, 14 aa, BK virus
ACMFQLLIFVACLL

SEQ ID NO: 29533 - protein, 14 aa, BK virus
CMFQLLIFVACLLT

SEQ ID NO: 29534 - protein, 14 aa, BK virus
MFQLLIFVACLLTA

SEQ ID NO: 29535 - protein, 14 aa, BK virus
FQLLIFVACLLTAL

SEQ ID NO: 29536 - protein, 14 aa, BK virus
QLLIFVACLLTALE

SEQ ID NO: 29537 - protein, 14 aa, BK virus
LLIFVACLLTALEH

SEQ ID NO: 29538 - protein, 14 aa, BK virus
LIFVACLLTALEHN

SEQ ID NO: 29539 - protein, 14 aa, BK virus
IFVACLLTALEHNS

SEQ ID NO: 29540 - protein, 14 aa, BK virus
FVACLLTALEHNSG

SEQ ID NO: 29541 - protein, 14 aa, BK virus
VACLLTALEHNSGE

SEQ ID NO: 29542 - protein, 14 aa, BK virus
ACLLTALEHNSGEA

SEQ ID NO: 29543 - protein, 14 aa, BK virus
CLLTALEHNSGEAL

SEQ ID NO: 29544 - protein, 14 aa, BK virus
LLTALEHNSGEALQ

SEQ ID NO: 29545 - protein, 14 aa, BK virus
LTALEHNSGEALQD

SEQ ID NO: 29546 - protein, 14 aa, BK virus
TALEHNSGEALQDI

SEQ ID NO: 29547 - protein, 14 aa, BK virus
ALEHNSGEALQDIL

SEQ ID NO: 29548 - protein, 14 aa, BK virus
LEHNSGEALQDILR

SEQ ID NO: 29549 - protein, 14 aa, BK virus
EHNSGEALQDILRS

SEQ ID NO: 29550 - protein, 14 aa, BK virus
HNSGEALQDILRSA

SEQ ID NO: 29551 - protein, 14 aa, BK virus
TGEPREWMGSLCMV

SEQ ID NO: 29552 - protein, 14 aa, BK virus
GEPREWMGSLCMVW

SEQ ID NO: 29553 - protein, 14 aa, BK virus
EPREWMGSLCMVWN

SEQ ID NO: 29554 - protein, 14 aa, BK virus
PREWMGSLCMVWNP

SEQ ID NO: 29555 - protein, 14 aa, BK virus
REWMGSLCMVWNPR

SEQ ID NO: 29556 - protein, 14 aa, BK virus
KRLGCLMAQKDFQG

SEQ ID NO: 29557 - protein, 14 aa, BK virus
RLGCLMAQKDFQGT

SEQ ID NO: 29558 - protein, 14 aa, BK virus
LGCLMAQKDFQGTQ

SEQ ID NO: 29559 - protein, 14 aa, BK virus
GCLMAQKDFQGTQI

SEQ ID NO: 29560 - protein, 14 aa, BK virus
DILTNRDNCKPKCF

SEQ ID NO: 29561 - protein, 14 aa, BK virus
ILTNRDNCKPKCFK

SEQ ID NO: 29562 - protein, 14 aa, BK virus
LTNRDNCKPKCFKQ

SEQ ID NO: 29563 - protein, 14 aa, BK virus
TNRDNCKPKCFKQV

SEQ ID NO: 29564 - protein, 14 aa, BK virus
NRDNCKPKCFKQVL

SEQ ID NO: 29565 - protein, 14 aa, BK virus
RDNCKPKCFKQVLL

SEQ ID NO: 29566 - protein, 14 aa, BK virus
DNCKPKCFKQVLLL

SEQ ID NO: 29567 - protein, 14 aa, BK virus
NCKPKCFKQVLLLY

SEQ ID NO: 29568 - protein, 14 aa, BK virus
CKPKCFKQVLLLYI

SEQ ID NO: 29569 - protein, 14 aa, BK virus
KPKCFKQVLLLYIY

SEQ ID NO: 29570 - protein, 14 aa, BK virus
PKCFKQVLLLYIYI

SEQ ID NO: 29571 - protein, 14 aa, BK virus
MLLLYKPLLSLCYF

SEQ ID NO: 29572 - protein, 14 aa, BK virus
LLLYKPLLSLCYFG

SEQ ID NO: 29573 - protein, 14 aa, BK virus
LLYKPLLSLCYFGG

SEQ ID NO: 29574 - protein, 14 aa, BK virus
LYKPLLSLCYFGGG

SEQ ID NO: 29575 - protein, 14 aa, BK virus
YKPLLSLCYFGGGV

SEQ ID NO: 29576 - protein, 14 aa, BK virus
KPLLSLCYFGGGVL

SEQ ID NO: 29577 - protein, 14 aa, BK virus
PLLSLCYFGGGVLG

SEQ ID NO: 29578 - protein, 14 aa, BK virus
LLSLCYFGGGVLGL

SEQ ID NO: 29579 - protein, 14 aa, BK virus
LSLCYFGGGVLGLL

SEQ ID NO: 29580 - protein, 14 aa, BK virus
SLCYFGGGVLGLLK

SEQ ID NO: 29581 - protein, 14 aa, BK virus
LCYFGGGVLGLLKH

SEQ ID NO: 29582 - protein, 14 aa, BK virus
LWGSDLWESSAGAE

SEQ ID NO: 29583 - protein, 14 aa, BK virus
WGSDLWESSAGAEV

SEQ ID NO: 29584 - protein, 14 aa, BK virus
GSDLWESSAGAEVS

SEQ ID NO: 29585 - protein, 14 aa, BK virus
SDLWESSAGAEVSE

SEQ ID NO: 29586 - protein, 14 aa, BK virus
DLWESSAGAEVSET

SEQ ID NO: 29587 - protein, 14 aa, BK virus
LWESSAGAEVSETW

SEQ ID NO: 29588 - protein, 14 aa, BK virus
WESSAGAEVSETWE

SEQ ID NO: 29589 - protein, 14 aa, BK virus
ESSAGAEVSETWEE

SEQ ID NO: 29590 - protein, 14 aa, BK virus
SSAGAEVSETWEEH

SEQ ID NO: 29591 - protein, 14 aa, BK virus
SAGAEVSETWEEHC

SEQ ID NO: 29592 - protein, 14 aa, BK virus
AGAEVSETWEEHCD

SEQ ID NO: 29593 - protein, 14 aa, BK virus
GAEVSETWEEHCDW

SEQ ID NO: 29594 - protein, 14 aa, BK virus
AEVSETWEEHCDWD

SEQ ID NO: 29595 - protein, 14 aa, BK virus
EVSETWEEHCDWDS

SEQ ID NO: 29596 - protein, 14 aa, BK virus
VSETWEEHCDWDSV

SEQ ID NO: 29597 - protein, 14 aa, BK virus
SETWEEHCDWDSVL

SEQ ID NO: 29598 - protein, 14 aa, BK virus
ETWEEHCDWDSVLD

SEQ ID NO: 29599 - protein, 14 aa, BK virus
TWEEHCDWDSVLDP

SEQ ID NO: 29600 - protein, 14 aa, BK virus
WEEHCDWDSVLDPC

SEQ ID NO: 29601 - protein, 14 aa, BK virus
EEHCDWDSVLDPCP

SEQ ID NO: 29602 - protein, 14 aa, BK virus
EHCDWDSVLDPCPE

SEQ ID NO: 29603 - protein, 14 aa, BK virus
HCDWDSVLDPCPES

SEQ ID NO: 29604 - protein, 14 aa, BK virus
CDWDSVLDPCPESS

SEQ ID NO: 29605 - protein, 14 aa, BK virus
DWDSVLDPCPESSV

SEQ ID NO: 29606 - protein, 14 aa, BK virus
WDSVLDPCPESSVS

SEQ ID NO: 29607 - protein, 14 aa, BK virus
DSVLDPCPESSVSE

SEQ ID NO: 29608 - protein, 14 aa, BK virus
SVLDPCPESSVSES

SEQ ID NO: 29609 - protein, 14 aa, BK virus
VLDPCPESSVSESS

SEQ ID NO: 29610 - protein, 14 aa, BK virus
LDPCPESSVSESSS

SEQ ID NO: 29611 - protein, 14 aa, BK virus
DPCPESSVSESSSL

SEQ ID NO: 29612 - protein, 14 aa, BK virus
PCPESSVSESSSLV

SEQ ID NO: 29613 - protein, 14 aa, BK virus
CPESSVSESSSLVI

SEQ ID NO: 29614 - protein, 14 aa, BK virus
PESSVSESSSLVIS

SEQ ID NO: 29615 - protein, 14 aa, BK virus
ESSVSESSSLVISR

SEQ ID NO: 29616 - protein, 14 aa, BK virus
SSVSESSSLVISRI

SEQ ID NO: 29617 - protein, 14 aa, BK virus
SVSESSSLVISRIH

SEQ ID NO: 29618 - protein, 14 aa, BK virus
VSESSSLVISRIHF

SEQ ID NO: 29619 - protein, 14 aa, BK virus
SESSSLVISRIHFP

SEQ ID NO: 29620 - protein, 14 aa, BK virus
ESSSLVISRIHFPM

SEQ ID NO: 29621 - protein, 14 aa, BK virus
SSSLVISRIHFPMH

SEQ ID NO: 29622 - protein, 14 aa, BK virus
SSLVISRIHFPMHI

SEQ ID NO: 29623 - protein, 14 aa, BK virus
SLVISRIHFPMHIL

SEQ ID NO: 29624 - protein, 14 aa, BK virus
LVISRIHFPMHILY

SEQ ID NO: 29625 - protein, 14 aa, BK virus
VISRIHFPMHILYF

SEQ ID NO: 29626 - protein, 14 aa, BK virus
ISRIHFPMHILYFI

SEQ ID NO: 29627 - protein, 14 aa, BK virus
SRIHFPMHILYFIL

SEQ ID NO: 29628 - protein, 14 aa, BK virus
RIHFPMHILYFILE

SEQ ID NO: 29629 - protein, 14 aa, BK virus
IHFPMHILYFILEK

SEQ ID NO: 29630 - protein, 14 aa, BK virus
HFPMHILYFILEKV

SEQ ID NO: 29631 - protein, 14 aa, BK virus
FPMHILYFILEKVY

SEQ ID NO: 29632 - protein, 14 aa, BK virus
PMHILYFILEKVYI

SEQ ID NO: 29633 - protein, 14 aa, BK virus
MHILYFILEKVYIL

SEQ ID NO: 29634 - protein, 14 aa, BK virus
HILYFILEKVYILI

SEQ ID NO: 29635 - protein, 14 aa, BK virus
ILYFILEKVYILIS

SEQ ID NO: 29636 - protein, 14 aa, BK virus
LYFILEKVYILISE

SEQ ID NO: 29637 - protein, 14 aa, BK virus
YFILEKVYILISES

SEQ ID NO: 29638 - protein, 14 aa, BK virus
FILEKVYILISESS

SEQ ID NO: 29639 - protein, 14 aa, BK virus
ILEKVYILISESSL

SEQ ID NO: 29640 - protein, 14 aa, BK virus
LEKVYILISESSLS

SEQ ID NO: 29641 - protein, 14 aa, BK virus
EKVYILISESSLSF

SEQ ID NO: 29642 - protein, 14 aa, BK virus
KVYILISESSLSFH

SEQ ID NO: 29643 - protein, 14 aa, BK virus
VYILISESSLSFHS

SEQ ID NO: 29644 - protein, 14 aa, BK virus
YILISESSLSFHST

SEQ ID NO: 29645 - protein, 14 aa, BK virus
ILISESSLSFHSTI

SEQ ID NO: 29646 - protein, 14 aa, BK virus
LISESSLSFHSTIL

SEQ ID NO: 29647 - protein, 14 aa, BK virus
ISESSLSFHSTILD

SEQ ID NO: 29648 - protein, 14 aa, BK virus
SESSLSFHSTILDC

SEQ ID NO: 29649 - protein, 14 aa, BK virus
ESSLSFHSTILDCI

SEQ ID NO: 29650 - protein, 14 aa, BK virus
SSLSFHSTILDCIS

SEQ ID NO: 29651 - protein, 14 aa, BK virus
SLSFHSTILDCISV

SEQ ID NO: 29652 - protein, 14 aa, BK virus
LSFHSTILDCISVA

SEQ ID NO: 29653 - protein, 14 aa, BK virus
SFHSTILDCISVAK

SEQ ID NO: 29654 - protein, 14 aa, BK virus
FHSTILDCISVAKS

SEQ ID NO: 29655 - protein, 14 aa, BK virus
HSTILDCISVAKSA

SEQ ID NO: 29656 - protein, 14 aa, BK virus
STILDCISVAKSAT

SEQ ID NO: 29657 - protein, 14 aa, BK virus
TILDCISVAKSATG

SEQ ID NO: 29658 - protein, 14 aa, BK virus
ILDCISVAKSATGL

SEQ ID NO: 29659 - protein, 14 aa, BK virus
LDCISVAKSATGLN

SEQ ID NO: 29660 - protein, 14 aa, BK virus
DCISVAKSATGLNQ

SEQ ID NO: 29661 - protein, 14 aa, BK virus
CISVAKSATGLNQI

SEQ ID NO: 29662 - protein, 14 aa, BK virus
ISVAKSATGLNQIS

SEQ ID NO: 29663 - protein, 14 aa, BK virus
SVAKSATGLNQISS

SEQ ID NO: 29664 - protein, 14 aa, BK virus
VAKSATGLNQISSS

SEQ ID NO: 29665 - protein, 14 aa, BK virus
AKSATGLNQISSSN

SEQ ID NO: 29666 - protein, 14 aa, BK virus
KSATGLNQISSSNK

SEQ ID NO: 29667 - protein, 14 aa, BK virus
SATGLNQISSSNKV

SEQ ID NO: 29668 - protein, 14 aa, BK virus
ATGLNQISSSNKVI

SEQ ID NO: 29669 - protein, 14 aa, BK virus
TGLNQISSSNKVIP

SEQ ID NO: 29670 - protein, 14 aa, BK virus
GLNQISSSNKVIPL

SEQ ID NO: 29671 - protein, 14 aa, BK virus
LNQISSSNKVIPLC

SEQ ID NO: 29672 - protein, 14 aa, BK virus
NQISSSNKVIPLCK

SEQ ID NO: 29673 - protein, 14 aa, BK virus
QISSSNKVIPLCKI

SEQ ID NO: 29674 - protein, 14 aa, BK virus
ISSSNKVIPLCKIL

SEQ ID NO: 29675 - protein, 14 aa, BK virus
SSSNKVIPLCKILF

SEQ ID NO: 29676 - protein, 14 aa, BK virus
SSNKVIPLCKILFS

SEQ ID NO: 29677 - protein, 14 aa, BK virus
SNKVIPLCKILFSS

SEQ ID NO: 29678 - protein, 14 aa, BK virus
NKVIPLCKILFSSK

SEQ ID NO: 29679 - protein, 14 aa, BK virus
KVIPLCKILFSSKN

SEQ ID NO: 29680 - protein, 14 aa, BK virus
VIPLCKILFSSKNS

SEQ ID NO: 29681 - protein, 14 aa, BK virus
IPLCKILFSSKNSE

SEQ ID NO: 29682 - protein, 14 aa, BK virus
PLCKILFSSKNSEF

SEQ ID NO: 29683 - protein, 14 aa, BK virus
LCKILFSSKNSEFC

SEQ ID NO: 29684 - protein, 14 aa, BK virus
CKILFSSKNSEFCK

SEQ ID NO: 29685 - protein, 14 aa, BK virus
KILFSSKNSEFCKD

SEQ ID NO: 29686 - protein, 14 aa, BK virus
ILFSSKNSEFCKDF

SEQ ID NO: 29687 - protein, 14 aa, BK virus
LFSSKNSEFCKDFL

SEQ ID NO: 29688 - protein, 14 aa, BK virus
FSSKNSEFCKDFLK

SEQ ID NO: 29689 - protein, 14 aa, BK virus
SSKNSEFCKDFLKY

SEQ ID NO: 29690 - protein, 14 aa, BK virus
SKNSEFCKDFLKYI

SEQ ID NO: 29691 - protein, 14 aa, BK virus
KNSEFCKDFLKYIL

SEQ ID NO: 29692 - protein, 14 aa, BK virus
NSEFCKDFLKYILG

SEQ ID NO: 29693 - protein, 14 aa, BK virus
SEFCKDFLKYILGL

SEQ ID NO: 29694 - protein, 14 aa, BK virus
EFCKDFLKYILGLK

SEQ ID NO: 29695 - protein, 14 aa, BK virus
FCKDFLKYILGLKS

SEQ ID NO: 29696 - protein, 14 aa, BK virus
CKDFLKYILGLKSI

SEQ ID NO: 29697 - protein, 14 aa, BK virus
KDFLKYILGLKSIC

SEQ ID NO: 29698 - protein, 14 aa, BK virus
DFLKYILGLKSICL

SEQ ID NO: 29699 - protein, 14 aa, BK virus
FLKYILGLKSICLT

SEQ ID NO: 29700 - protein, 14 aa, BK virus
LKYILGLKSICLTN

SEQ ID NO: 29701 - protein, 14 aa, BK virus
KYILGLKSICLTNL

SEQ ID NO: 29702 - protein, 14 aa, BK virus
YILGLKSICLTNLA

SEQ ID NO: 29703 - protein, 14 aa, BK virus
ILGLKSICLTNLAC

SEQ ID NO: 29704 - protein, 14 aa, BK virus
LGLKSICLTNLACR

SEQ ID NO: 29705 - protein, 14 aa, BK virus
GLKSICLTNLACRV

SEQ ID NO: 29706 - protein, 14 aa, BK virus
LKSICLTNLACRVL

SEQ ID NO: 29707 - protein, 14 aa, BK virus
KSICLTNLACRVLG

SEQ ID NO: 29708 - protein, 14 aa, BK virus
SICLTNLACRVLGT

SEQ ID NO: 29709 - protein, 14 aa, BK virus
ICLTNLACRVLGTG

SEQ ID NO: 29710 - protein, 14 aa, BK virus
CLTNLACRVLGTGY

SEQ ID NO: 29711 - protein, 14 aa, BK virus
LTNLACRVLGTGYS

SEQ ID NO: 29712 - protein, 14 aa, BK virus
TNLACRVLGTGYSF

SEQ ID NO: 29713 - protein, 14 aa, BK virus
NLACRVLGTGYSFI

SEQ ID NO: 29714 - protein, 14 aa, BK virus
LACRVLGTGYSFIV

SEQ ID NO: 29715 - protein, 14 aa, BK virus
ACRVLGTGYSFIVT

SEQ ID NO: 29716 - protein, 14 aa, BK virus
CRVLGTGYSFIVTK

SEQ ID NO: 29717 - protein, 14 aa, BK virus
RVLGTGYSFIVTKP

SEQ ID NO: 29718 - protein, 14 aa, BK virus
VLGTGYSFIVTKPG

SEQ ID NO: 29719 - protein, 14 aa, BK virus
LGTGYSFIVTKPGG

SEQ ID NO: 29720 - protein, 14 aa, BK virus
GTGYSFIVTKPGGN

SEQ ID NO: 29721 - protein, 14 aa, BK virus
TGYSFIVTKPGGNI

SEQ ID NO: 29722 - protein, 14 aa, BK virus
GYSFIVTKPGGNIW

SEQ ID NO: 29723 - protein, 14 aa, BK virus
YSFIVTKPGGNIWV

SEQ ID NO: 29724 - protein, 14 aa, BK virus
SFIVTKPGGNIWVL

SEQ ID NO: 29725 - protein, 14 aa, BK virus
FIVTKPGGNIWVLL

SEQ ID NO: 29726 - protein, 14 aa, BK virus
IVTKPGGNIWVLLF

SEQ ID NO: 29727 - protein, 14 aa, BK virus
VTKPGGNIWVLLFK

SEQ ID NO: 29728 - protein, 14 aa, BK virus
TKPGGNIWVLLFKC

SEQ ID NO: 29729 - protein, 14 aa, BK virus
KPGGNIWVLLFKCF

SEQ ID NO: 29730 - protein, 14 aa, BK virus
PGGNIWVLLFKCFF

SEQ ID NO: 29731 - protein, 14 aa, BK virus
GGNIWVLLFKCFFS

SEQ ID NO: 29732 - protein, 14 aa, BK virus
GNIWVLLFKCFFSK

SEQ ID NO: 29733 - protein, 14 aa, BK virus
NIWVLLFKCFFSKF

SEQ ID NO: 29734 - protein, 14 aa, BK virus
IWVLLFKCFFSKFT

SEQ ID NO: 29735 - protein, 14 aa, BK virus
WVLLFKCFFSKFTL

SEQ ID NO: 29736 - protein, 14 aa, BK virus
VLLFKCFFSKFTLT

SEQ ID NO: 29737 - protein, 14 aa, BK virus
LLFKCFFSKFTLTL

SEQ ID NO: 29738 - protein, 14 aa, BK virus
LFKCFFSKFTLTLP

SEQ ID NO: 29739 - protein, 14 aa, BK virus
FKCFFSKFTLTLPS

SEQ ID NO: 29740 - protein, 14 aa, BK virus
KCFFSKFTLTLPSK

SEQ ID NO: 29741 - protein, 14 aa, BK virus
SLKLSKLFIPCPEG

SEQ ID NO: 29742 - protein, 14 aa, BK virus
LKLSKLFIPCPEGK

SEQ ID NO: 29743 - protein, 14 aa, BK virus
KLSKLFIPCPEGKS

SEQ ID NO: 29744 - protein, 14 aa, BK virus
LSKLFIPCPEGKSF

SEQ ID NO: 29745 - protein, 14 aa, BK virus
SKLFIPCPEGKSFD

SEQ ID NO: 29746 - protein, 14 aa, BK virus
KLFIPCPEGKSFDS

SEQ ID NO: 29747 - protein, 14 aa, BK virus
LFIPCPEGKSFDSA

SEQ ID NO: 29748 - protein, 14 aa, BK virus
FIPCPEGKSFDSAP

SEQ ID NO: 29749 - protein, 14 aa, BK virus
IPCPEGKSFDSAPV

SEQ ID NO: 29750 - protein, 14 aa, BK virus
PCPEGKSFDSAPVP

SEQ ID NO: 29751 - protein, 14 aa, BK virus
CPEGKSFDSAPVPF

SEQ ID NO: 29752 - protein, 14 aa, BK virus
PEGKSFDSAPVPFT

SEQ ID NO: 29753 - protein, 14 aa, BK virus
EGKSFDSAPVPFTS

SEQ ID NO: 29754 - protein, 14 aa, BK virus
GKSFDSAPVPFTSS

SEQ ID NO: 29755 - protein, 14 aa, BK virus
KSFDSAPVPFTSSK

SEQ ID NO: 29756 - protein, 14 aa, BK virus
SFDSAPVPFTSSKT

SEQ ID NO: 29757 - protein, 14 aa, BK virus
FDSAPVPFTSSKTT

SEQ ID NO: 29758 - protein, 14 aa, BK virus
DSAPVPFTSSKTTM

SEQ ID NO: 29759 - protein, 14 aa, BK virus
SAPVPFTSSKTTMY

SEQ ID NO: 29760 - protein, 14 aa, BK virus
SIATPSSKVSLSMG

SEQ ID NO: 29761 - protein, 14 aa, BK virus
IATPSSKVSLSMGR

SEQ ID NO: 29762 - protein, 14 aa, BK virus
ATPSSKVSLSMGRF

SEQ ID NO: 29763 - protein, 14 aa, BK virus
TPSSKVSLSMGRFT

SEQ ID NO: 29764 - protein, 14 aa, BK virus
PSSKVSLSMGRFTF

SEQ ID NO: 29765 - protein, 14 aa, BK virus
SSKVSLSMGRFTFK

SEQ ID NO: 29766 - protein, 14 aa, BK virus
SKVSLSMGRFTFKA

SEQ ID NO: 29767 - protein, 14 aa, BK virus
KVSLSMGRFTFKAL

SEQ ID NO: 29768 - protein, 14 aa, BK virus
VSLSMGRFTFKALP

SEQ ID NO: 29769 - protein, 14 aa, BK virus
SLSMGRFTFKALPP

SEQ ID NO: 29770 - protein, 14 aa, BK virus
LSMGRFTFKALPPH

SEQ ID NO: 29771 - protein, 14 aa, BK virus
SMGRFTFKALPPHK

SEQ ID NO: 29772 - protein, 14 aa, BK virus
MGRFTFKALPPHKS

SEQ ID NO: 29773 - protein, 14 aa, BK virus
GRFTFKALPPHKSN

SEQ ID NO: 29774 - protein, 14 aa, BK virus
RFTFKALPPHKSNN

SEQ ID NO: 29775 - protein, 14 aa, BK virus
FTFKALPPHKSNNP

SEQ ID NO: 29776 - protein, 14 aa, BK virus
TFKALPPHKSNNPA

SEQ ID NO: 29777 - protein, 14 aa, BK virus
FKALPPHKSNNPAA

SEQ ID NO: 29778 - protein, 14 aa, BK virus
KALPPHKSNNPAAS

SEQ ID NO: 29779 - protein, 14 aa, BK virus
ALPPHKSNNPAASV

SEQ ID NO: 29780 - protein, 14 aa, BK virus
LPPHKSNNPAASVV

SEQ ID NO: 29781 - protein, 14 aa, BK virus
PPHKSNNPAASVVF

SEQ ID NO: 29782 - protein, 14 aa, BK virus
PHKSNNPAASVVFP

SEQ ID NO: 29783 - protein, 14 aa, BK virus
HKSNNPAASVVFPL

SEQ ID NO: 29784 - protein, 14 aa, BK virus
KSNNPAASVVFPLS

SEQ ID NO: 29785 - protein, 14 aa, BK virus
SNNPAASVVFPLSM

SEQ ID NO: 29786 - protein, 14 aa, BK virus
NNPAASVVFPLSMG

SEQ ID NO: 29787 - protein, 14 aa, BK virus
NPAASVVFPLSMGP

SEQ ID NO: 29788 - protein, 14 aa, BK virus
PAASVVFPLSMGPL

SEQ ID NO: 29789 - protein, 14 aa, BK virus
AASVVFPLSMGPLN

SEQ ID NO: 29790 - protein, 14 aa, BK virus
ASVVFPLSMGPLNN

SEQ ID NO: 29791 - protein, 14 aa, BK virus
SVVFPLSMGPLNNQ

SEQ ID NO: 29792 - protein, 14 aa, BK virus
VVFPLSMGPLNNQY

SEQ ID NO: 29793 - protein, 14 aa, BK virus
VFPLSMGPLNNQYL

SEQ ID NO: 29794 - protein, 14 aa, BK virus
FPLSMGPLNNQYLL

SEQ ID NO: 29795 - protein, 14 aa, BK virus
PLSMGPLNNQYLLL

SEQ ID NO: 29796 - protein, 14 aa, BK virus
LSMGPLNNQYLLLG

SEQ ID NO: 29797 - protein, 14 aa, BK virus
SMGPLNNQYLLLGT

SEQ ID NO: 29798 - protein, 14 aa, BK virus
MGPLNNQYLLLGTL

SEQ ID NO: 29799 - protein, 14 aa, BK virus
GPLNNQYLLLGTLK

SEQ ID NO: 29800 - protein, 14 aa, BK virus
PLNNQYLLLGTLKT

SEQ ID NO: 29801 - protein, 14 aa, BK virus
LNNQYLLLGTLKTI

SEQ ID NO: 29802 - protein, 14 aa, BK virus
NNQYLLLGTLKTIQ

SEQ ID NO: 29803 - protein, 14 aa, BK virus
NQYLLLGTLKTIQC

SEQ ID NO: 29804 - protein, 14 aa, BK virus
QYLLLGTLKTIQCK

SEQ ID NO: 29805 - protein, 14 aa, BK virus
YLLLGTLKTIQCKK

SEQ ID NO: 29806 - protein, 14 aa, BK virus
LLLGTLKTIQCKKS

SEQ ID NO: 29807 - protein, 14 aa, BK virus
LLGTLKTIQCKKSN

SEQ ID NO: 29808 - protein, 14 aa, BK virus
LGTLKTIQCKKSNI

SEQ ID NO: 29809 - protein, 14 aa, BK virus
GTLKTIQCKKSNIT

SEQ ID NO: 29810 - protein, 14 aa, BK virus
TLKTIQCKKSNITE

SEQ ID NO: 29811 - protein, 14 aa, BK virus
LKTIQCKKSNITES

SEQ ID NO: 29812 - protein, 14 aa, BK virus
KTIQCKKSNITESI

SEQ ID NO: 29813 - protein, 14 aa, BK virus
TIQCKKSNITESIL

SEQ ID NO: 29814 - protein, 14 aa, BK virus
IQCKKSNITESILG

SEQ ID NO: 29815 - protein, 14 aa, BK virus
QCKKSNITESILGS

SEQ ID NO: 29816 - protein, 14 aa, BK virus
CKKSNITESILGSK

SEQ ID NO: 29817 - protein, 14 aa, BK virus
KKSNITESILGSKQ

SEQ ID NO: 29818 - protein, 14 aa, BK virus
KSNITESILGSKQC

SEQ ID NO: 29819 - protein, 14 aa, BK virus
SNITESILGSKQCS

SEQ ID NO: 29820 - protein, 14 aa, BK virus
NITESILGSKQCSQ

SEQ ID NO: 29821 - protein, 14 aa, BK virus
ITESILGSKQCSQA

SEQ ID NO: 29822 - protein, 14 aa, BK virus
TESILGSKQCSQAT

SEQ ID NO: 29823 - protein, 14 aa, BK virus
ESILGSKQCSQATP

SEQ ID NO: 29824 - protein, 14 aa, BK virus
SILGSKQCSQATPA

SEQ ID NO: 29825 - protein, 14 aa, BK virus
ILGSKQCSQATPAI

SEQ ID NO: 29826 - protein, 14 aa, BK virus
LGSKQCSQATPAIY

SEQ ID NO: 29827 - protein, 14 aa, BK virus
GSKQCSQATPAIYC

SEQ ID NO: 29828 - protein, 14 aa, BK virus
SKQCSQATPAIYCS

SEQ ID NO: 29829 - protein, 14 aa, BK virus
KQCSQATPAIYCSS

SEQ ID NO: 29830 - protein, 14 aa, BK virus
QCSQATPAIYCSST

SEQ ID NO: 29831 - protein, 14 aa, BK virus
CSQATPAIYCSSTA

SEQ ID NO: 29832 - protein, 14 aa, BK virus
SQATPAIYCSSTAF

SEQ ID NO: 29833 - protein, 14 aa, BK virus
QATPAIYCSSTAFP

SEQ ID NO: 29834 - protein, 14 aa, BK virus
RVSTLFLAKTVSTA

SEQ ID NO: 29835 - protein, 14 aa, BK virus
VSTLFLAKTVSTAC

SEQ ID NO: 29836 - protein, 14 aa, BK virus
FLLSAKIIAFAKCF

SEQ ID NO: 29837 - protein, 14 aa, BK virus
LLSAKIIAFAKCFS

SEQ ID NO: 29838 - protein, 14 aa, BK virus
NSKYIPNNKNTSSH

SEQ ID NO: 29839 - protein, 14 aa, BK virus
SKYIPNNKNTSSHF

SEQ ID NO: 29840 - protein, 14 aa, BK virus
KYIPNNKNTSSHFV

SEQ ID NO: 29841 - protein, 14 aa, BK virus
YIPNNKNTSSHFVS

SEQ ID NO: 29842 - protein, 14 aa, BK virus
IPNNKNTSSHFVST

SEQ ID NO: 29843 - protein, 14 aa, BK virus
PNNKNTSSHFVSTA

SEQ ID NO: 29844 - protein, 14 aa, BK virus
NNKNTSSHFVSTAY

SEQ ID NO: 29845 - protein, 14 aa, BK virus
NKNTSSHFVSTAYS

SEQ ID NO: 29846 - protein, 14 aa, BK virus
KNTSSHFVSTAYSV

SEQ ID NO: 29847 - protein, 14 aa, BK virus
NTSSHFVSTAYSVI

SEQ ID NO: 29848 - protein, 14 aa, BK virus
TSSHFVSTAYSVIN

SEQ ID NO: 29849 - protein, 14 aa, BK virus
SSHFVSTAYSVINF

SEQ ID NO: 29850 - protein, 14 aa, BK virus
SHFVSTAYSVINFQ

SEQ ID NO: 29851 - protein, 14 aa, BK virus
HFVSTAYSVINFQD

SEQ ID NO: 29852 - protein, 14 aa, BK virus
FVSTAYSVINFQDT

SEQ ID NO: 29853 - protein, 14 aa, BK virus
VSTAYSVINFQDTC

SEQ ID NO: 29854 - protein, 14 aa, BK virus
STAYSVINFQDTCF

SEQ ID NO: 29855 - protein, 14 aa, BK virus
TAYSVINFQDTCFV

SEQ ID NO: 29856 - protein, 14 aa, BK virus
AYSVINFQDTCFVS

SEQ ID NO: 29857 - protein, 14 aa, BK virus
YSVINFQDTCFVSS

SEQ ID NO: 29858 - protein, 14 aa, BK virus
SVINFQDTCFVSSG

SEQ ID NO: 29859 - protein, 14 aa, BK virus
VINFQDTCFVSSGS

SEQ ID NO: 29860 - protein, 14 aa, BK virus
INFQDTCFVSSGSS

SEQ ID NO: 29861 - protein, 14 aa, BK virus
NFQDTCFVSSGSSG

SEQ ID NO: 29862 - protein, 14 aa, BK virus
FQDTCFVSSGSSGL

SEQ ID NO: 29863 - protein, 14 aa, BK virus
QDTCFVSSGSSGLK

SEQ ID NO: 29864 - protein, 14 aa, BK virus
DTCFVSSGSSGLKS

SEQ ID NO: 29865 - protein, 14 aa, BK virus
TCFVSSGSSGLKSC

SEQ ID NO: 29866 - protein, 14 aa, BK virus
CFVSSGSSGLKSCS

SEQ ID NO: 29867 - protein, 14 aa, BK virus
FVSSGSSGLKSCSF

SEQ ID NO: 29868 - protein, 14 aa, BK virus
VSSGSSGLKSCSFK

SEQ ID NO: 29869 - protein, 14 aa, BK virus
SSGSSGLKSCSFKP

SEQ ID NO: 29870 - protein, 14 aa, BK virus
SGSSGLKSCSFKPP

SEQ ID NO: 29871 - protein, 14 aa, BK virus
MLSSIVWYGSLVKA

SEQ ID NO: 29872 - protein, 14 aa, BK virus
LSSIVWYGSLVKAL

SEQ ID NO: 29873 - protein, 14 aa, BK virus
SSIVWYGSLVKALY

SEQ ID NO: 29874 - protein, 14 aa, BK virus
SIVWYGSLVKALYS

SEQ ID NO: 29875 - protein, 14 aa, BK virus
IVWYGSLVKALYSK

SEQ ID NO: 29876 - protein, 14 aa, BK virus
VWYGSLVKALYSKY

SEQ ID NO: 29877 - protein, 14 aa, BK virus
WYGSLVKALYSKYS

SEQ ID NO: 29878 - protein, 14 aa, BK virus
YGSLVKALYSKYSL

SEQ ID NO: 29879 - protein, 14 aa, BK virus
GSLVKALYSKYSLL

SEQ ID NO: 29880 - protein, 14 aa, BK virus
SLVKALYSKYSLLT

SEQ ID NO: 29881 - protein, 14 aa, BK virus
LVKALYSKYSLLTP

SEQ ID NO: 29882 - protein, 14 aa, BK virus
VKALYSKYSLLTPL

SEQ ID NO: 29883 - protein, 14 aa, BK virus
KALYSKYSLLTPLQ

SEQ ID NO: 29884 - protein, 14 aa, BK virus
ALYSKYSLLTPLQI

SEQ ID NO: 29885 - protein, 14 aa, BK virus
LYSKYSLLTPLQIK

SEQ ID NO: 29886 - protein, 14 aa, BK virus
YSKYSLLTPLQIKK

SEQ ID NO: 29887 - protein, 14 aa, BK virus
SKYSLLTPLQIKKL

SEQ ID NO: 29888 - protein, 14 aa, BK virus
KYSLLTPLQIKKLK

SEQ ID NO: 29889 - protein, 14 aa, BK virus
YSLLTPLQIKKLKV

SEQ ID NO: 29890 - protein, 14 aa, BK virus
SLLTPLQIKKLKVH

SEQ ID NO: 29891 - protein, 14 aa, BK virus
LLTPLQIKKLKVHS

SEQ ID NO: 29892 - protein, 14 aa, BK virus
LTPLQIKKLKVHSF

SEQ ID NO: 29893 - protein, 14 aa, BK virus
QKLLIAETLCLCGV

SEQ ID NO: 29894 - protein, 14 aa, BK virus
KLLIAETLCLCGVK

SEQ ID NO: 29895 - protein, 14 aa, BK virus
LLIAETLCLCGVKK

SEQ ID NO: 29896 - protein, 14 aa, BK virus
LIAETLCLCGVKKN

SEQ ID NO: 29897 - protein, 14 aa, BK virus
IAETLCLCGVKKNI

SEQ ID NO: 29898 - protein, 14 aa, BK virus
AETLCLCGVKKNII

SEQ ID NO: 29899 - protein, 14 aa, BK virus
ETLCLCGVKKNIIL

SEQ ID NO: 29900 - protein, 14 aa, BK virus
TLCLCGVKKNIILC

SEQ ID NO: 29901 - protein, 14 aa, BK virus
LCLCGVKKNIILCP

SEQ ID NO: 29902 - protein, 14 aa, BK virus
CLCGVKKNIILCPA

SEQ ID NO: 29903 - protein, 14 aa, BK virus
LCGVKKNIILCPAH

SEQ ID NO: 29904 - protein, 14 aa, BK virus
CGVKKNIILCPAHM

SEQ ID NO: 29905 - protein, 14 aa, BK virus
GVKKNIILCPAHMC

SEQ ID NO: 29906 - protein, 14 aa, BK virus
VKKNIILCPAHMCL

SEQ ID NO: 29907 - protein, 14 aa, BK virus
KKNIILCPAHMCLL

SEQ ID NO: 29908 - protein, 14 aa, BK virus
KNIILCPAHMCLLI

SEQ ID NO: 29909 - protein, 14 aa, BK virus
NIILCPAHMCLLIK

SEQ ID NO: 29910 - protein, 14 aa, BK virus
IILCPAHMCLLIKV

SEQ ID NO: 29911 - protein, 14 aa, BK virus
ILCPAHMCLLIKVT

SEQ ID NO: 29912 - protein, 14 aa, BK virus
LCPAHMCLLIKVTE

SEQ ID NO: 29913 - protein, 14 aa, BK virus
CPAHMCLLIKVTEY

SEQ ID NO: 29914 - protein, 14 aa, BK virus
PAHMCLLIKVTEYF

SEQ ID NO: 29915 - protein, 14 aa, BK virus
AHMCLLIKVTEYFS

SEQ ID NO: 29916 - protein, 14 aa, BK virus
HMCLLIKVTEYFSI

SEQ ID NO: 29917 - protein, 14 aa, BK virus
MCLLIKVTEYFSIS

SEQ ID NO: 29918 - protein, 14 aa, BK virus
CLLIKVTEYFSISF

SEQ ID NO: 29919 - protein, 14 aa, BK virus
LLIKVTEYFSISFL

SEQ ID NO: 29920 - protein, 14 aa, BK virus
LIKVTEYFSISFLY

SEQ ID NO: 29921 - protein, 14 aa, BK virus
IKVTEYFSISFLYR

SEQ ID NO: 29922 - protein, 14 aa, BK virus
KVTEYFSISFLYRI

SEQ ID NO: 29923 - protein, 14 aa, BK virus
AFSLVVYTAKQARV

SEQ ID NO: 29924 - protein, 14 aa, BK virus
FSLVVYTAKQARVL

SEQ ID NO: 29925 - protein, 14 aa, BK virus
SLVVYTAKQARVLL

SEQ ID NO: 29926 - protein, 14 aa, BK virus
LVVYTAKQARVLLL

SEQ ID NO: 29927 - protein, 14 aa, BK virus
VVYTAKQARVLLLN

SEQ ID NO: 29928 - protein, 14 aa, BK virus
VYTAKQARVLLLNT

SEQ ID NO: 29929 - protein, 14 aa, BK virus
YTAKQARVLLLNTA

SEQ ID NO: 29930 - protein, 14 aa, BK virus
LRNWCRSEGKSLGS

SEQ ID NO: 29931 - protein, 14 aa, BK virus
RNWCRSEGKSLGSS

SEQ ID NO: 29932 - protein, 14 aa, BK virus
NWCRSEGKSLGSST

SEQ ID NO: 29933 - protein, 14 aa, BK virus
WCRSEGKSLGSSTF

SEQ ID NO: 29934 - protein, 14 aa, BK virus
CRSEGKSLGSSTFL

SEQ ID NO: 29935 - protein, 14 aa, BK virus
RSEGKSLGSSTFLF

SEQ ID NO: 29936 - protein, 14 aa, BK virus
SEGKSLGSSTFLFF

SEQ ID NO: 29937 - protein, 14 aa, BK virus
EGKSLGSSTFLFFL

SEQ ID NO: 29938 - protein, 14 aa, BK virus
GKSLGSSTFLFFLG

SEQ ID NO: 29939 - protein, 14 aa, BK virus
KSLGSSTFLFFLGG

SEQ ID NO: 29940 - protein, 14 aa, BK virus
SLGSSTFLFFLGGV

SEQ ID NO: 29941 - protein, 14 aa, BK virus
LGSSTFLFFLGGVE

SEQ ID NO: 29942 - protein, 14 aa, BK virus
GSSTFLFFLGGVEC

SEQ ID NO: 29943 - protein, 14 aa, BK virus
ESAVASSSLANISS

SEQ ID NO: 29944 - protein, 14 aa, BK virus
SAVASSSLANISSW

SEQ ID NO: 29945 - protein, 14 aa, BK virus
AVASSSLANISSWQ

SEQ ID NO: 29946 - protein, 14 aa, BK virus
VASSSLANISSWQN

SEQ ID NO: 29947 - protein, 14 aa, BK virus
ASSSLANISSWQNK

SEQ ID NO: 29948 - protein, 14 aa, BK virus
SSSLANISSWQNKS

SEQ ID NO: 29949 - protein, 14 aa, BK virus
SSLANISSWQNKSS

SEQ ID NO: 29950 - protein, 14 aa, BK virus
SLANISSWQNKSSS

SEQ ID NO: 29951 - protein, 14 aa, BK virus
LANISSWQNKSSSH

SEQ ID NO: 29952 - protein, 14 aa, BK virus
ANISSWQNKSSSHF

SEQ ID NO: 29953 - protein, 14 aa, BK virus
NISSWQNKSSSHFS

SEQ ID NO: 29954 - protein, 14 aa, BK virus
ISSWQNKSSSHFSL

SEQ ID NO: 29955 - protein, 14 aa, BK virus
SSWQNKSSSHFSLK

SEQ ID NO: 29956 - protein, 14 aa, BK virus
SWQNKSSSHFSLKE

SEQ ID NO: 29957 - protein, 14 aa, BK virus
WQNKSSSHFSLKEL

SEQ ID NO: 29958 - protein, 14 aa, BK virus
QNKSSSHFSLKELH

SEQ ID NO: 29959 - protein, 14 aa, BK virus
NKSSSHFSLKELHQ

SEQ ID NO: 29960 - protein, 14 aa, BK virus
KSSSHFSLKELHQD

SEQ ID NO: 29961 - protein, 14 aa, BK virus
SSSHFSLKELHQDS

SEQ ID NO: 29962 - protein, 14 aa, BK virus
SSHFSLKELHQDSH

SEQ ID NO: 29963 - protein, 14 aa, BK virus
SHFSLKELHQDSHS

SEQ ID NO: 29964 - protein, 14 aa, BK virus
HFSLKELHQDSHSS

SEQ ID NO: 29965 - protein, 14 aa, BK virus
FSLKELHQDSHSSV

SEQ ID NO: 29966 - protein, 14 aa, BK virus
SLKELHQDSHSSVP

SEQ ID NO: 29967 - protein, 14 aa, BK virus
VGTYKKNNYLGPFN

SEQ ID NO: 29968 - protein, 14 aa, BK virus
GTYKKNNYLGPFNI

SEQ ID NO: 29969 - protein, 14 aa, BK virus
TYKKNNYLGPFNIL

SEQ ID NO: 29970 - protein, 14 aa, BK virus
YKKNNYLGPFNILL

SEQ ID NO: 29971 - protein, 14 aa, BK virus
KKNNYLGPFNILLF

SEQ ID NO: 29972 - protein, 14 aa, BK virus
KNNYLGPFNILLFI

SEQ ID NO: 29973 - protein, 14 aa, BK virus
REFLQLFGPTIAEF

SEQ ID NO: 29974 - protein, 14 aa, BK virus
EFLQLFGPTIAEFL

SEQ ID NO: 29975 - protein, 14 aa, BK virus
FLQLFGPTIAEFLQ

SEQ ID NO: 29976 - protein, 14 aa, BK virus
LQLFGPTIAEFLQL

SEQ ID NO: 29977 - protein, 14 aa, BK virus
QLFGPTIAEFLQLG

SEQ ID NO: 29978 - protein, 14 aa, BK virus
LFGPTIAEFLQLGL

SEQ ID NO: 29979 - protein, 14 aa, BK virus
FGPTIAEFLQLGLS

SEQ ID NO: 29980 - protein, 14 aa, BK virus
GPTIAEFLQLGLSQ

SEQ ID NO: 29981 - protein, 14 aa, BK virus
PTIAEFLQLGLSQT

SEQ ID NO: 29982 - protein, 14 aa, BK virus
TIAEFLQLGLSQTT

SEQ ID NO: 29983 - protein, 14 aa, BK virus
IAEFLQLGLSQTTV

SEQ ID NO: 29984 - protein, 14 aa, BK virus
SSQCSSNLSKPRAL

SEQ ID NO: 29985 - protein, 14 aa, BK virus
SQCSSNLSKPRALF

SEQ ID NO: 29986 - protein, 14 aa, BK virus
QCSSNLSKPRALFL

SEQ ID NO: 29987 - protein, 14 aa, BK virus
CSSNLSKPRALFLK

SEQ ID NO: 29988 - protein, 14 aa, BK virus
SSNLSKPRALFLKI

SEQ ID NO: 29989 - protein, 14 aa, BK virus
SNLSKPRALFLKIF

SEQ ID NO: 29990 - protein, 14 aa, BK virus
NLSKPRALFLKIFY

SEQ ID NO: 29991 - protein, 14 aa, BK virus
LSKPRALFLKIFYL

SEQ ID NO: 29992 - protein, 14 aa, BK virus
SKPRALFLKIFYLN

SEQ ID NO: 29993 - protein, 14 aa, BK virus
KPRALFLKIFYLNA

SEQ ID NO: 29994 - protein, 14 aa, BK virus
PRALFLKIFYLNAL

SEQ ID NO: 29995 - protein, 14 aa, BK virus
RALFLKIFYLNALI

SEQ ID NO: 29996 - protein, 14 aa, BK virus
ADIACKGSAQKAFW

SEQ ID NO: 29997 - protein, 14 aa, BK virus
DIACKGSAQKAFWN

SEQ ID NO: 29998 - protein, 14 aa, BK virus
IACKGSAQKAFWNK

SEQ ID NO: 29999 - protein, 14 aa, BK virus
AIPCSTGYLGKEEN

SEQ ID NO: 30000 - protein, 14 aa, BK virus
IPCSTGYLGKEENQ

SEQ ID NO: 30001 - protein, 14 aa, BK virus
PCSTGYLGKEENQH

SEQ ID NO: 30002 - protein, 14 aa, BK virus
CSTGYLGKEENQHK

SEQ ID NO: 30003 - protein, 14 aa, BK virus
STGYLGKEENQHKP

SEQ ID NO: 30004 - protein, 14 aa, BK virus
TGYLGKEENQHKPL

SEQ ID NO: 30005 - protein, 14 aa, BK virus
GYLGKEENQHKPLS

SEQ ID NO: 30006 - protein, 14 aa, BK virus
YLGKEENQHKPLSY

SEQ ID NO: 30007 - protein, 14 aa, BK virus
LGKEENQHKPLSYS

SEQ ID NO: 30008 - protein, 14 aa, BK virus
GKEENQHKPLSYSR

SEQ ID NO: 30009 - protein, 14 aa, BK virus
KEENQHKPLSYSRF

SEQ ID NO: 30010 - protein, 14 aa, BK virus
EENQHKPLSYSRFQ

SEQ ID NO: 30011 - protein, 14 aa, BK virus
ENQHKPLSYSRFQN

SEQ ID NO: 30012 - protein, 14 aa, BK virus
NQHKPLSYSRFQNQ

SEQ ID NO: 30013 - protein, 14 aa, BK virus
QHKPLSYSRFQNQA

SEQ ID NO: 30014 - protein, 14 aa, BK virus
HKPLSYSRFQNQAD

SEQ ID NO: 30015 - protein, 14 aa, BK virus
KPLSYSRFQNQADE

SEQ ID NO: 30016 - protein, 14 aa, BK virus
PLSYSRFQNQADEL

SEQ ID NO: 30017 - protein, 14 aa, BK virus
LSYSRFQNQADELP

SEQ ID NO: 30018 - protein, 14 aa, BK virus
SYSRFQNQADELPL

SEQ ID NO: 30019 - protein, 14 aa, BK virus
YSRFQNQADELPLH

SEQ ID NO: 30020 - protein, 14 aa, BK virus
SRFQNQADELPLHP

SEQ ID NO: 30021 - protein, 14 aa, BK virus
RFQNQADELPLHPA

SEQ ID NO: 30022 - protein, 14 aa, BK virus
FQNQADELPLHPAP

SEQ ID NO: 30023 - protein, 14 aa, BK virus
QNQADELPLHPAPF

SEQ ID NO: 30024 - protein, 14 aa, BK virus
NQADELPLHPAPFF

SEQ ID NO: 30025 - protein, 14 aa, BK virus
QADELPLHPAPFFY

SEQ ID NO: 30026 - protein, 14 aa, BK virus
ADELPLHPAPFFYT

SEQ ID NO: 30027 - protein, 14 aa, BK virus
DELPLHPAPFFYTK

SEQ ID NO: 30028 - protein, 14 aa, BK virus
ELPLHPAPFFYTKY

SEQ ID NO: 30029 - protein, 14 aa, BK virus
LPLHPAPFFYTKYS

SEQ ID NO: 30030 - protein, 14 aa, BK virus
PLHPAPFFYTKYSF

SEQ ID NO: 30031 - protein, 14 aa, BK virus
LHPAPFFYTKYSFS

SEQ ID NO: 30032 - protein, 14 aa, BK virus
HPAPFFYTKYSFSS

SEQ ID NO: 30033 - protein, 14 aa, BK virus
PAPFFYTKYSFSSF

SEQ ID NO: 30034 - protein, 14 aa, BK virus
APFFYTKYSFSSFY

SEQ ID NO: 30035 - protein, 14 aa, BK virus
PFFYTKYSFSSFYP

SEQ ID NO: 30036 - protein, 14 aa, BK virus
FFYTKYSFSSFYPR

SEQ ID NO: 30037 - protein, 14 aa, BK virus
FYTKYSFSSFYPRR

SEQ ID NO: 30038 - protein, 14 aa, BK virus
YTKYSFSSFYPRRP

SEQ ID NO: 30039 - protein, 14 aa, BK virus
TKYSFSSFYPRRPL

SEQ ID NO: 30040 - protein, 14 aa, BK virus
KYSFSSFYPRRPLC

SEQ ID NO: 30041 - protein, 14 aa, BK virus
YSFSSFYPRRPLCQ

SEQ ID NO: 30042 - protein, 14 aa, BK virus
SFSSFYPRRPLCQG

SEQ ID NO: 30043 - protein, 14 aa, BK virus
FSSFYPRRPLCQGE

SEQ ID NO: 30044 - protein, 14 aa, BK virus
SSFYPRRPLCQGEI

SEQ ID NO: 30045 - protein, 14 aa, BK virus
SFYPRRPLCQGEIP

SEQ ID NO: 30046 - protein, 14 aa, BK virus
FYPRRPLCQGEIPY

SEQ ID NO: 30047 - protein, 14 aa, BK virus
YPRRPLCQGEIPYT

SEQ ID NO: 30048 - protein, 14 aa, BK virus
PRRPLCQGEIPYTS

SEQ ID NO: 30049 - protein, 14 aa, BK virus
RRPLCQGEIPYTSL

SEQ ID NO: 30050 - protein, 14 aa, BK virus
RPLCQGEIPYTSLN

SEQ ID NO: 30051 - protein, 14 aa, BK virus
PLCQGEIPYTSLNK

SEQ ID NO: 30052 - protein, 14 aa, BK virus
LCQGEIPYTSLNKL

SEQ ID NO: 30053 - protein, 14 aa, BK virus
CQGEIPYTSLNKLF

SEQ ID NO: 30054 - protein, 14 aa, BK virus
QGEIPYTSLNKLFS

SEQ ID NO: 30055 - protein, 14 aa, BK virus
GEIPYTSLNKLFSL

SEQ ID NO: 30056 - protein, 14 aa, BK virus
EIPYTSLNKLFSLR

SEQ ID NO: 30057 - protein, 14 aa, BK virus
IPYTSLNKLFSLRE

SEQ ID NO: 30058 - protein, 14 aa, BK virus
PYTSLNKLFSLRED

SEQ ID NO: 30059 - protein, 14 aa, BK virus
YTSLNKLFSLREDF

SEQ ID NO: 30060 - protein, 14 aa, BK virus
TSLNKLFSLREDFP

SEQ ID NO: 30061 - protein, 14 aa, BK virus
SLNKLFSLREDFPR

SEQ ID NO: 30062 - protein, 14 aa, BK virus
LNKLFSLREDFPRQ

SEQ ID NO: 30063 - protein, 14 aa, BK virus
NKLFSLREDFPRQL

SEQ ID NO: 30064 - protein, 14 aa, BK virus
KLFSLREDFPRQLF

SEQ ID NO: 30065 - protein, 14 aa, BK virus
LFSLREDFPRQLFQ

SEQ ID NO: 30066 - protein, 14 aa, BK virus
FSLREDFPRQLFQG

SEQ ID NO: 30067 - protein, 14 aa, BK virus
SLREDFPRQLFQGL

SEQ ID NO: 30068 - protein, 14 aa, BK virus
LREDFPRQLFQGLK

SEQ ID NO: 30069 - protein, 14 aa, BK virus
REDFPRQLFQGLKG

SEQ ID NO: 30070 - protein, 14 aa, BK virus
EDFPRQLFQGLKGP

SEQ ID NO: 30071 - protein, 15 aa, BK virus
GFPQIVLLGLRKSLH

SEQ ID NO: 30072 - protein, 15 aa, BK virus
FPQIVLLGLRKSLHT

SEQ ID NO: 30073 - protein, 15 aa, BK virus
PQIVLLGLRKSLHTL

SEQ ID NO: 30074 - protein, 15 aa, BK virus
QIVLLGLRKSLHTLT

SEQ ID NO: 30075 - protein, 15 aa, BK virus
IVLLGLRKSLHTLTT

SEQ ID NO: 30076 - protein, 15 aa, BK virus
EKGWRQRRPRPLIYY

SEQ ID NO: 30077 - protein, 15 aa, BK virus
KGWRQRRPRPLIYYK

SEQ ID NO: 30078 - protein, 15 aa, BK virus
GWRQRRPRPLIYYKK

SEQ ID NO: 30079 - protein, 15 aa, BK virus
WRQRRPRPLIYYKKK

SEQ ID NO: 30080 - protein, 15 aa, BK virus
RQRRPRPLIYYKKKG

SEQ ID NO: 30081 - protein, 15 aa, BK virus
QRRPRPLIYYKKKGH

SEQ ID NO: 30082 - protein, 15 aa, BK virus
RRPRPLIYYKKKGHR

SEQ ID NO: 30083 - protein, 15 aa, BK virus
RPRPLIYYKKKGHRE

SEQ ID NO: 30084 - protein, 15 aa, BK virus
PRPLIYYKKKGHREE

SEQ ID NO: 30085 - protein, 15 aa, BK virus
RPLIYYKKKGHREEL

SEQ ID NO: 30086 - protein, 15 aa, BK virus
PLIYYKKKGHREELL

SEQ ID NO: 30087 - protein, 15 aa, BK virus
LIYYKKKGHREELLT

SEQ ID NO: 30088 - protein, 15 aa, BK virus
IYYKKKGHREELLTH

SEQ ID NO: 30089 - protein, 15 aa, BK virus
YYKKKGHREELLTHG

SEQ ID NO: 30090 - protein, 15 aa, BK virus
YKKKGHREELLTHGM

SEQ ID NO: 30091 - protein, 15 aa, BK virus
KKKGHREELLTHGMQ

SEQ ID NO: 30092 - protein, 15 aa, BK virus
KKGHREELLTHGMQP

SEQ ID NO: 30093 - protein, 15 aa, BK virus
KGHREELLTHGMQPN

SEQ ID NO: 30094 - protein, 15 aa, BK virus
GHREELLTHGMQPNH

SEQ ID NO: 30095 - protein, 15 aa, BK virus
HREELLTHGMQPNHD

SEQ ID NO: 30096 - protein, 15 aa, BK virus
REELLTHGMQPNHDL

SEQ ID NO: 30097 - protein, 15 aa, BK virus
EELLTHGMQPNHDLR

SEQ ID NO: 30098 - protein, 15 aa, BK virus
ELLTHGMQPNHDLRK

SEQ ID NO: 30099 - protein, 15 aa, BK virus
LLTHGMQPNHDLRKE

SEQ ID NO: 30100 - protein, 15 aa, BK virus
LTHGMQPNHDLRKES

SEQ ID NO: 30101 - protein, 15 aa, BK virus
THGMQPNHDLRKESA

SEQ ID NO: 30102 - protein, 15 aa, BK virus
LTGECSQTMTSGRKV

SEQ ID NO: 30103 - protein, 15 aa, BK virus
TGECSQTMTSGRKVH

SEQ ID NO: 30104 - protein, 15 aa, BK virus
GECSQTMTSGRKVHD

SEQ ID NO: 30105 - protein, 15 aa, BK virus
ECSQTMTSGRKVHDS

SEQ ID NO: 30106 - protein, 15 aa, BK virus
CSQTMTSGRKVHDSQ

SEQ ID NO: 30107 - protein, 15 aa, BK virus
SQTMTSGRKVHDSQG

SEQ ID NO: 30108 - protein, 15 aa, BK virus
QTMTSGRKVHDSQGG

SEQ ID NO: 30109 - protein, 15 aa, BK virus
TMTSGRKVHDSQGGA

SEQ ID NO: 30110 - protein, 15 aa, BK virus
MTSGRKVHDSQGGAA

SEQ ID NO: 30111 - protein, 15 aa, BK virus
TSGRKVHDSQGGAAY

SEQ ID NO: 30112 - protein, 15 aa, BK virus
SGRKVHDSQGGAAYP

SEQ ID NO: 30113 - protein, 15 aa, BK virus
GRKVHDSQGGAAYPW

SEQ ID NO: 30114 - protein, 15 aa, BK virus
RKVHDSQGGAAYPWN

SEQ ID NO: 30115 - protein, 15 aa, BK virus
KVHDSQGGAAYPWNA

SEQ ID NO: 30116 - protein, 15 aa, BK virus
VHDSQGGAAYPWNAA

SEQ ID NO: 30117 - protein, 15 aa, BK virus
HDSQGGAAYPWNAAK

SEQ ID NO: 30118 - protein, 15 aa, BK virus
DSQGGAAYPWNAAKP

SEQ ID NO: 30119 - protein, 15 aa, BK virus
PQEGKCMTDMFCEPR

SEQ ID NO: 30120 - protein, 15 aa, BK virus
QEGKCMTDMFCEPRN

SEQ ID NO: 30121 - protein, 15 aa, BK virus
EGKCMTDMFCEPRNL

SEQ ID NO: 30122 - protein, 15 aa, BK virus
GKCMTDMFCEPRNLG

SEQ ID NO: 30123 - protein, 15 aa, BK virus
KCMTDMFCEPRNLGL

SEQ ID NO: 30124 - protein, 15 aa, BK virus
CMTDMFCEPRNLGLV

SEQ ID NO: 30125 - protein, 15 aa, BK virus
MTDMFCEPRNLGLVP

SEQ ID NO: 30126 - protein, 15 aa, BK virus
TDMFCEPRNLGLVPS

SEQ ID NO: 30127 - protein, 15 aa, BK virus
TGQRPWFCASCHDKL

SEQ ID NO: 30128 - protein, 15 aa, BK virus
GQRPWFCASCHDKLQ

SEQ ID NO: 30129 - protein, 15 aa, BK virus
KLVKPGLEQKKELRG

SEQ ID NO: 30130 - protein, 15 aa, BK virus
LVKPGLEQKKELRGF

SEQ ID NO: 30131 - protein, 15 aa, BK virus
VKPGLEQKKELRGFL

SEQ ID NO: 30132 - protein, 15 aa, BK virus
KPGLEQKKELRGFLF

SEQ ID NO: 30133 - protein, 15 aa, BK virus
PGLEQKKELRGFLFL

SEQ ID NO: 30134 - protein, 15 aa, BK virus
GLEQKKELRGFLFLF

SEQ ID NO: 30135 - protein, 15 aa, BK virus
VIPFFLYFQVHGCCS

SEQ ID NO: 30136 - protein, 15 aa, BK virus
IPFFLYFQVHGCCSS

SEQ ID NO: 30137 - protein, 15 aa, BK virus
PFFLYFQVHGCCSST

SEQ ID NO: 30138 - protein, 15 aa, BK virus
FFLYFQVHGCCSSTF

SEQ ID NO: 30139 - protein, 15 aa, BK virus
FLYFQVHGCCSSTFG

SEQ ID NO: 30140 - protein, 15 aa, BK virus
LYFQVHGCCSSTFGG

SEQ ID NO: 30141 - protein, 15 aa, BK virus
YFQVHGCCSSTFGGP

SEQ ID NO: 30142 - protein, 15 aa, BK virus
FQVHGCCSSTFGGPS

SEQ ID NO: 30143 - protein, 15 aa, BK virus
QVHGCCSSTFGGPSC

SEQ ID NO: 30144 - protein, 15 aa, BK virus
VHGCCSSTFGGPSCQ

SEQ ID NO: 30145 - protein, 15 aa, BK virus
HGCCSSTFGGPSCQC

SEQ ID NO: 30146 - protein, 15 aa, BK virus
GCCSSTFGGPSCQCI

SEQ ID NO: 30147 - protein, 15 aa, BK virus
NCCWGGCCCYRSSNC

SEQ ID NO: 30148 - protein, 15 aa, BK virus
CCWGGCCCYRSSNCI

SEQ ID NO: 30149 - protein, 15 aa, BK virus
CWGGCCCYRSSNCIP

SEQ ID NO: 30150 - protein, 15 aa, BK virus
WGGCCCYRSSNCIPC

SEQ ID NO: 30151 - protein, 15 aa, BK virus
GGCCCYRSSNCIPCY

SEQ ID NO: 30152 - protein, 15 aa, BK virus
GCCCYRSSNCIPCYC

SEQ ID NO: 30153 - protein, 15 aa, BK virus
CCCYRSSNCIPCYCR

SEQ ID NO: 30154 - protein, 15 aa, BK virus
CCYRSSNCIPCYCRG

SEQ ID NO: 30155 - protein, 15 aa, BK virus
CYRSSNCIPCYCRGH

SEQ ID NO: 30156 - protein, 15 aa, BK virus
YRSSNCIPCYCRGHN

SEQ ID NO: 30157 - protein, 15 aa, BK virus
RSSNCIPCYCRGHNK

SEQ ID NO: 30158 - protein, 15 aa, BK virus
SSNCIPCYCRGHNKY

SEQ ID NO: 30159 - protein, 15 aa, BK virus
SNCIPCYCRGHNKYL

SEQ ID NO: 30160 - protein, 15 aa, BK virus
NCIPCYCRGHNKYLR

SEQ ID NO: 30161 - protein, 15 aa, BK virus
CIPCYCRGHNKYLRG

SEQ ID NO: 30162 - protein, 15 aa, BK virus
IPCYCRGHNKYLRGY

SEQ ID NO: 30163 - protein, 15 aa, BK virus
PCYCRGHNKYLRGYS

SEQ ID NO: 30164 - protein, 15 aa, BK virus
CYCRGHNKYLRGYSC

SEQ ID NO: 30165 - protein, 15 aa, BK virus
YCRGHNKYLRGYSCY

SEQ ID NO: 30166 - protein, 15 aa, BK virus
CRGHNKYLRGYSCYR

SEQ ID NO: 30167 - protein, 15 aa, BK virus
RGHNKYLRGYSCYRP

SEQ ID NO: 30168 - protein, 15 aa, BK virus
GHNKYLRGYSCYRPN

SEQ ID NO: 30169 - protein, 15 aa, BK virus
HNKYLRGYSCYRPNS

SEQ ID NO: 30170 - protein, 15 aa, BK virus
NKYLRGYSCYRPNSS

SEQ ID NO: 30171 - protein, 15 aa, BK virus
KYLRGYSCYRPNSSN

SEQ ID NO: 30172 - protein, 15 aa, BK virus
YLRGYSCYRPNSSNI

SEQ ID NO: 30173 - protein, 15 aa, BK virus
LRGYSCYRPNSSNIC

SEQ ID NO: 30174 - protein, 15 aa, BK virus
RGYSCYRPNSSNICC

SEQ ID NO: 30175 - protein, 15 aa, BK virus
GYSCYRPNSSNICCN

SEQ ID NO: 30176 - protein, 15 aa, BK virus
YSCYRPNSSNICCNC

SEQ ID NO: 30177 - protein, 15 aa, BK virus
SCYRPNSSNICCNCW

SEQ ID NO: 30178 - protein, 15 aa, BK virus
CYRPNSSNICCNCWC

SEQ ID NO: 30179 - protein, 15 aa, BK virus
YRPNSSNICCNCWCS

SEQ ID NO: 30180 - protein, 15 aa, BK virus
RPNSSNICCNCWCSW

SEQ ID NO: 30181 - protein, 15 aa, BK virus
PNSSNICCNCWCSWG

SEQ ID NO: 30182 - protein, 15 aa, BK virus
NSSNICCNCWCSWGY

SEQ ID NO: 30183 - protein, 15 aa, BK virus
SSNICCNCWCSWGYC

SEQ ID NO: 30184 - protein, 15 aa, BK virus
SNICCNCWCSWGYCW

SEQ ID NO: 30185 - protein, 15 aa, BK virus
NICCNCWCSWGYCWV

SEQ ID NO: 30186 - protein, 15 aa, BK virus
ICCNCWCSWGYCWVC

SEQ ID NO: 30187 - protein, 15 aa, BK virus
CCNCWCSWGYCWVCC

SEQ ID NO: 30188 - protein, 15 aa, BK virus
CNCWCSWGYCWVCCF

SEQ ID NO: 30189 - protein, 15 aa, BK virus
NCWCSWGYCWVCCFN

SEQ ID NO: 30190 - protein, 15 aa, BK virus
CWCSWGYCWVCCFNS

SEQ ID NO: 30191 - protein, 15 aa, BK virus
WCSWGYCWVCCFNSN

SEQ ID NO: 30192 - protein, 15 aa, BK virus
CSWGYCWVCCFNSNC

SEQ ID NO: 30193 - protein, 15 aa, BK virus
LGSQSFHCRPLSAIR

SEQ ID NO: 30194 - protein, 15 aa, BK virus
GSQSFHCRPLSAIRH

SEQ ID NO: 30195 - protein, 15 aa, BK virus
SQSFHCRPLSAIRHG

SEQ ID NO: 30196 - protein, 15 aa, BK virus
QSFHCRPLSAIRHGF

SEQ ID NO: 30197 - protein, 15 aa, BK virus
SFHCRPLSAIRHGFG

SEQ ID NO: 30198 - protein, 15 aa, BK virus
FHCRPLSAIRHGFGI

SEQ ID NO: 30199 - protein, 15 aa, BK virus
HCRPLSAIRHGFGIV

SEQ ID NO: 30200 - protein, 15 aa, BK virus
ALGSFFVCYYFPGFV

SEQ ID NO: 30201 - protein, 15 aa, BK virus
LGSFFVCYYFPGFVA

SEQ ID NO: 30202 - protein, 15 aa, BK virus
GSFFVCYYFPGFVAC

SEQ ID NO: 30203 - protein, 15 aa, BK virus
SFFVCYYFPGFVACY

SEQ ID NO: 30204 - protein, 15 aa, BK virus
YTFYNLTGIAEKNRK

SEQ ID NO: 30205 - protein, 15 aa, BK virus
TFYNLTGIAEKNRKI

SEQ ID NO: 30206 - protein, 15 aa, BK virus
FYNLTGIAEKNRKIF

SEQ ID NO: 30207 - protein, 15 aa, BK virus
IFGGNYLDNCKCPYK

SEQ ID NO: 30208 - protein, 15 aa, BK virus
FGGNYLDNCKCPYKL

SEQ ID NO: 30209 - protein, 15 aa, BK virus
GGNYLDNCKCPYKLL

SEQ ID NO: 30210 - protein, 15 aa, BK virus
QYRRSYTKNGLKKST

SEQ ID NO: 30211 - protein, 15 aa, BK virus
YRRSYTKNGLKKSTK

SEQ ID NO: 30212 - protein, 15 aa, BK virus
RRSYTKNGLKKSTKC

SEQ ID NO: 30213 - protein, 15 aa, BK virus
RSYTKNGLKKSTKCT

SEQ ID NO: 30214 - protein, 15 aa, BK virus
SYTKNGLKKSTKCTF

SEQ ID NO: 30215 - protein, 15 aa, BK virus
YTKNGLKKSTKCTFR

SEQ ID NO: 30216 - protein, 15 aa, BK virus
TKNGLKKSTKCTFRR

SEQ ID NO: 30217 - protein, 15 aa, BK virus
KNGLKKSTKCTFRRV

SEQ ID NO: 30218 - protein, 15 aa, BK virus
NGLKKSTKCTFRRVY

SEQ ID NO: 30219 - protein, 15 aa, BK virus
GLKKSTKCTFRRVYR

SEQ ID NO: 30220 - protein, 15 aa, BK virus
LKKSTKCTFRRVYRK

SEQ ID NO: 30221 - protein, 15 aa, BK virus
KKSTKCTFRRVYRKN

SEQ ID NO: 30222 - protein, 15 aa, BK virus
KSTKCTFRRVYRKNY

SEQ ID NO: 30223 - protein, 15 aa, BK virus
STKCTFRRVYRKNYC

SEQ ID NO: 30224 - protein, 15 aa, BK virus
TKCTFRRVYRKNYCP

SEQ ID NO: 30225 - protein, 15 aa, BK virus
KCTFRRVYRKNYCPR

SEQ ID NO: 30226 - protein, 15 aa, BK virus
CTFRRVYRKNYCPRR

SEQ ID NO: 30227 - protein, 15 aa, BK virus
TFRRVYRKNYCPRRC

SEQ ID NO: 30228 - protein, 15 aa, BK virus
SKNCSSMDVAFTSRP

SEQ ID NO: 30229 - protein, 15 aa, BK virus
KNCSSMDVAFTSRPV

SEQ ID NO: 30230 - protein, 15 aa, BK virus
NCSSMDVAFTSRPVR

SEQ ID NO: 30231 - protein, 15 aa, BK virus
CSSMDVAFTSRPVRD

SEQ ID NO: 30232 - protein, 15 aa, BK virus
SSMDVAFTSRPVRDC

SEQ ID NO: 30233 - protein, 15 aa, BK virus
SMDVAFTSRPVRDCN

SEQ ID NO: 30234 - protein, 15 aa, BK virus
MDVAFTSRPVRDCNT

SEQ ID NO: 30235 - protein, 15 aa, BK virus
DVAFTSRPVRDCNTC

SEQ ID NO: 30236 - protein, 15 aa, BK virus
VAFTSRPVRDCNTCS

SEQ ID NO: 30237 - protein, 15 aa, BK virus
RWPQPKEKESVQGQL

SEQ ID NO: 30238 - protein, 15 aa, BK virus
WPQPKEKESVQGQLP

SEQ ID NO: 30239 - protein, 15 aa, BK virus
PQPKEKESVQGQLPK

SEQ ID NO: 30240 - protein, 15 aa, BK virus
QPKEKESVQGQLPKS

SEQ ID NO: 30241 - protein, 15 aa, BK virus
PKEKESVQGQLPKSQ

SEQ ID NO: 30242 - protein, 15 aa, BK virus
KEKESVQGQLPKSQR

SEQ ID NO: 30243 - protein, 15 aa, BK virus
EKESVQGQLPKSQRN

SEQ ID NO: 30244 - protein, 15 aa, BK virus
KESVQGQLPKSQRNP

SEQ ID NO: 30245 - protein, 15 aa, BK virus
ESVQGQLPKSQRNPC

SEQ ID NO: 30246 - protein, 15 aa, BK virus
SVQGQLPKSQRNPCK

SEQ ID NO: 30247 - protein, 15 aa, BK virus
VQGQLPKSQRNPCKC

SEQ ID NO: 30248 - protein, 15 aa, BK virus
QGQLPKSQRNPCKCQ

SEQ ID NO: 30249 - protein, 15 aa, BK virus
GQLPKSQRNPCKCQN

SEQ ID NO: 30250 - protein, 15 aa, BK virus
QLPKSQRNPCKCQNY

SEQ ID NO: 30251 - protein, 15 aa, BK virus
TQKWGIQMKTLGALV

SEQ ID NO: 30252 - protein, 15 aa, BK virus
VLKMTLAVIAQREKC

SEQ ID NO: 30253 - protein, 15 aa, BK virus
LKMTLAVIAQREKCF

SEQ ID NO: 30254 - protein, 15 aa, BK virus
KMTLAVIAQREKCFP

SEQ ID NO: 30255 - protein, 15 aa, BK virus
MTLAVIAQREKCFPV

SEQ ID NO: 30256 - protein, 15 aa, BK virus
TLAVIAQREKCFPVT

SEQ ID NO: 30257 - protein, 15 aa, BK virus
LAVIAQREKCFPVTA

SEQ ID NO: 30258 - protein, 15 aa, BK virus
AVIAQREKCFPVTAQ

SEQ ID NO: 30259 - protein, 15 aa, BK virus
VIAQREKCFPVTAQQ

SEQ ID NO: 30260 - protein, 15 aa, BK virus
IAQREKCFPVTAQQE

SEQ ID NO: 30261 - protein, 15 aa, BK virus
AQREKCFPVTAQQEF

SEQ ID NO: 30262 - protein, 15 aa, BK virus
QREKCFPVTAQQEFP

SEQ ID NO: 30263 - protein, 15 aa, BK virus
REKCFPVTAQQEFPS

SEQ ID NO: 30264 - protein, 15 aa, BK virus
EKCFPVTAQQEFPSP

SEQ ID NO: 30265 - protein, 15 aa, BK virus
KCFPVTAQQEFPSPI

SEQ ID NO: 30266 - protein, 15 aa, BK virus
LACLTFMQGHKKCMS

SEQ ID NO: 30267 - protein, 15 aa, BK virus
ACLTFMQGHKKCMSM

SEQ ID NO: 30268 - protein, 15 aa, BK virus
CLTFMQGHKKCMSMV

SEQ ID NO: 30269 - protein, 15 aa, BK virus
LTFMQGHKKCMSMVE

SEQ ID NO: 30270 - protein, 15 aa, BK virus
TFMQGHKKCMSMVEE

SEQ ID NO: 30271 - protein, 15 aa, BK virus
FMQGHKKCMSMVEEN

SEQ ID NO: 30272 - protein, 15 aa, BK virus
MQGHKKCMSMVEENL

SEQ ID NO: 30273 - protein, 15 aa, BK virus
QGHKKCMSMVEENLF

SEQ ID NO: 30274 - protein, 15 aa, BK virus
GHKKCMSMVEENLFK

SEQ ID NO: 30275 - protein, 15 aa, BK virus
HKKCMSMVEENLFKA

SEQ ID NO: 30276 - protein, 15 aa, BK virus
KKCMSMVEENLFKAV

SEQ ID NO: 30277 - protein, 15 aa, BK virus
KCMSMVEENLFKAVI

SEQ ID NO: 30278 - protein, 15 aa, BK virus
CMSMVEENLFKAVIS

SEQ ID NO: 30279 - protein, 15 aa, BK virus
MSMVEENLFKAVIST

SEQ ID NO: 30280 - protein, 15 aa, BK virus
SMVEENLFKAVISTS

SEQ ID NO: 30281 - protein, 15 aa, BK virus
MVEENLFKAVISTSL

SEQ ID NO: 30282 - protein, 15 aa, BK virus
VEENLFKAVISTSLL

SEQ ID NO: 30283 - protein, 15 aa, BK virus
ILTIRPIWTKTMLIQ

SEQ ID NO: 30284 - protein, 15 aa, BK virus
LTIRPIWTKTMLIQL

SEQ ID NO: 30285 - protein, 15 aa, BK virus
TIRPIWTKTMLIQLS

SEQ ID NO: 30286 - protein, 15 aa, BK virus
IRPIWTKTMLIQLSA

SEQ ID NO: 30287 - protein, 15 aa, BK virus
RPIWTKTMLIQLSAG

SEQ ID NO: 30288 - protein, 15 aa, BK virus
PIWTKTMLIQLSAGY

SEQ ID NO: 30289 - protein, 15 aa, BK virus
IWTKTMLIQLSAGYL

SEQ ID NO: 30290 - protein, 15 aa, BK virus
WTKTMLIQLSAGYLI

SEQ ID NO: 30291 - protein, 15 aa, BK virus
TKTMLIQLSAGYLIP

SEQ ID NO: 30292 - protein, 15 aa, BK virus
KTMLIQLSAGYLIPV

SEQ ID NO: 30293 - protein, 15 aa, BK virus
TMLIQLSAGYLIPVE

SEQ ID NO: 30294 - protein, 15 aa, BK virus
MLIQLSAGYLIPVEM

SEQ ID NO: 30295 - protein, 15 aa, BK virus
LIQLSAGYLIPVEMK

SEQ ID NO: 30296 - protein, 15 aa, BK virus
IQLSAGYLIPVEMKM

SEQ ID NO: 30297 - protein, 15 aa, BK virus
QLSAGYLIPVEMKML

SEQ ID NO: 30298 - protein, 15 aa, BK virus
LSAGYLIPVEMKMLG

SEQ ID NO: 30299 - protein, 15 aa, BK virus
SAGYLIPVEMKMLGI

SEQ ID NO: 30300 - protein, 15 aa, BK virus
AGYLIPVEMKMLGIL

SEQ ID NO: 30301 - protein, 15 aa, BK virus
GYLIPVEMKMLGILG

SEQ ID NO: 30302 - protein, 15 aa, BK virus
YLIPVEMKMLGILGL

SEQ ID NO: 30303 - protein, 15 aa, BK virus
LIPVEMKMLGILGLS

SEQ ID NO: 30304 - protein, 15 aa, BK virus
IPVEMKMLGILGLSQ

SEQ ID NO: 30305 - protein, 15 aa, BK virus
PVEMKMLGILGLSQE

SEQ ID NO: 30306 - protein, 15 aa, BK virus
VEMKMLGILGLSQEG

SEQ ID NO: 30307 - protein, 15 aa, BK virus
EMKMLGILGLSQEGK

SEQ ID NO: 30308 - protein, 15 aa, BK virus
MKMLGILGLSQEGKM

SEQ ID NO: 30309 - protein, 15 aa, BK virus
KMLGILGLSQEGKMF

SEQ ID NO: 30310 - protein, 15 aa, BK virus
MLGILGLSQEGKMFP

SEQ ID NO: 30311 - protein, 15 aa, BK virus
LGILGLSQEGKMFPQ

SEQ ID NO: 30312 - protein, 15 aa, BK virus
GILGLSQEGKMFPQY

SEQ ID NO: 30313 - protein, 15 aa, BK virus
ILGLSQEGKMFPQYF

SEQ ID NO: 30314 - protein, 15 aa, BK virus
LGLSQEGKMFPQYFM

SEQ ID NO: 30315 - protein, 15 aa, BK virus
MNRVWGLFVKLIACM

SEQ ID NO: 30316 - protein, 15 aa, BK virus
NRVWGLFVKLIACMF

SEQ ID NO: 30317 - protein, 15 aa, BK virus
RVWGLFVKLIACMFQ

SEQ ID NO: 30318 - protein, 15 aa, BK virus
VWGLFVKLIACMFQL

SEQ ID NO: 30319 - protein, 15 aa, BK virus
WGLFVKLIACMFQLL

SEQ ID NO: 30320 - protein, 15 aa, BK virus
GLFVKLIACMFQLLI

SEQ ID NO: 30321 - protein, 15 aa, BK virus
LFVKLIACMFQLLIF

SEQ ID NO: 30322 - protein, 15 aa, BK virus
FVKLIACMFQLLIFV

SEQ ID NO: 30323 - protein, 15 aa, BK virus
VKLIACMFQLLIFVA

SEQ ID NO: 30324 - protein, 15 aa, BK virus
KLIACMFQLLIFVAC

SEQ ID NO: 30325 - protein, 15 aa, BK virus
LIACMFQLLIFVACL

SEQ ID NO: 30326 - protein, 15 aa, BK virus
IACMFQLLIFVACLL

SEQ ID NO: 30327 - protein, 15 aa, BK virus
ACMFQLLIFVACLLT

SEQ ID NO: 30328 - protein, 15 aa, BK virus
CMFQLLIFVACLLTA

SEQ ID NO: 30329 - protein, 15 aa, BK virus
MFQLLIFVACLLTAL

SEQ ID NO: 30330 - protein, 15 aa, BK virus
FQLLIFVACLLTALE

SEQ ID NO: 30331 - protein, 15 aa, BK virus
QLLIFVACLLTALEH

SEQ ID NO: 30332 - protein, 15 aa, BK virus
LLIFVACLLTALEHN

SEQ ID NO: 30333 - protein, 15 aa, BK virus
LIFVACLLTALEHNS

SEQ ID NO: 30334 - protein, 15 aa, BK virus
IFVACLLTALEHNSG

SEQ ID NO: 30335 - protein, 15 aa, BK virus
FVACLLTALEHNSGE

SEQ ID NO: 30336 - protein, 15 aa, BK virus
VACLLTALEHNSGEA

SEQ ID NO: 30337 - protein, 15 aa, BK virus
ACLLTALEHNSGEAL

SEQ ID NO: 30338 - protein, 15 aa, BK virus
CLLTALEHNSGEALQ

SEQ ID NO: 30339 - protein, 15 aa, BK virus
LLTALEHNSGEALQD

SEQ ID NO: 30340 - protein, 15 aa, BK virus
LTALEHNSGEALQDI

SEQ ID NO: 30341 - protein, 15 aa, BK virus
TALEHNSGEALQDIL

SEQ ID NO: 30342 - protein, 15 aa, BK virus
ALEHNSGEALQDILR

SEQ ID NO: 30343 - protein, 15 aa, BK virus
LEHNSGEALQDILRS

SEQ ID NO: 30344 - protein, 15 aa, BK virus
EHNSGEALQDILRSA

SEQ ID NO: 30345 - protein, 15 aa, BK virus
TGEPREWMGSLCMVW

SEQ ID NO: 30346 - protein, 15 aa, BK virus
GEPREWMGSLCMVWN

SEQ ID NO: 30347 - protein, 15 aa, BK virus
EPREWMGSLCMVWNP

SEQ ID NO: 30348 - protein, 15 aa, BK virus
PREWMGSLCMVWNPR

SEQ ID NO: 30349 - protein, 15 aa, BK virus
KRLGCLMAQKDFQGT

SEQ ID NO: 30350 - protein, 15 aa, BK virus
RLGCLMAQKDFQGTQ

SEQ ID NO: 30351 - protein, 15 aa, BK virus
LGCLMAQKDFQGTQI

SEQ ID NO: 30352 - protein, 15 aa, BK virus
DILTNRDNCKPKCFK

SEQ ID NO: 30353 - protein, 15 aa, BK virus
ILTNRDNCKPKCFKQ

SEQ ID NO: 30354 - protein, 15 aa, BK virus
LTNRDNCKPKCFKQV

SEQ ID NO: 30355 - protein, 15 aa, BK virus
TNRDNCKPKCFKQVL

SEQ ID NO: 30356 - protein, 15 aa, BK virus
NRDNCKPKCFKQVLL

SEQ ID NO: 30357 - protein, 15 aa, BK virus
RDNCKPKCFKQVLLL

SEQ ID NO: 30358 - protein, 15 aa, BK virus
DNCKPKCFKQVLLLY

SEQ ID NO: 30359 - protein, 15 aa, BK virus
NCKPKCFKQVLLLYI

SEQ ID NO: 30360 - protein, 15 aa, BK virus
CKPKCFKQVLLLYIY

SEQ ID NO: 30361 - protein, 15 aa, BK virus
KPKCFKQVLLLYIYI

SEQ ID NO: 30362 - protein, 15 aa, BK virus
MLLLYKPLLSLCYFG

SEQ ID NO: 30363 - protein, 15 aa, BK virus
LLLYKPLLSLCYFGG

SEQ ID NO: 30364 - protein, 15 aa, BK virus
LLYKPLLSLCYFGGG

SEQ ID NO: 30365 - protein, 15 aa, BK virus
LYKPLLSLCYFGGGV

SEQ ID NO: 30366 - protein, 15 aa, BK virus
YKPLLSLCYFGGGVL

SEQ ID NO: 30367 - protein, 15 aa, BK virus
KPLLSLCYFGGGVLG

SEQ ID NO: 30368 - protein, 15 aa, BK virus
PLLSLCYFGGGVLGL

SEQ ID NO: 30369 - protein, 15 aa, BK virus
LLSLCYFGGGVLGLL

SEQ ID NO: 30370 - protein, 15 aa, BK virus
LSLCYFGGGVLGLLK

SEQ ID NO: 30371 - protein, 15 aa, BK virus
SLCYFGGGVLGLLKH

SEQ ID NO: 30372 - protein, 15 aa, BK virus
LWGSDLWESSAGAEV

SEQ ID NO: 30373 - protein, 15 aa, BK virus
WGSDLWESSAGAEVS

SEQ ID NO: 30374 - protein, 15 aa, BK virus
GSDLWESSAGAEVSE

SEQ ID NO: 30375 - protein, 15 aa, BK virus
SDLWESSAGAEVSET

SEQ ID NO: 30376 - protein, 15 aa, BK virus
DLWESSAGAEVSETW

SEQ ID NO: 30377 - protein, 15 aa, BK virus
LWESSAGAEVSETWE

SEQ ID NO: 30378 - protein, 15 aa, BK virus
WESSAGAEVSETWEE

SEQ ID NO: 30379 - protein, 15 aa, BK virus
ESSAGAEVSETWEEH

SEQ ID NO: 30380 - protein, 15 aa, BK virus
SSAGAEVSETWEEHC

SEQ ID NO: 30381 - protein, 15 aa, BK virus
SAGAEVSETWEEHCD

SEQ ID NO: 30382 - protein, 15 aa, BK virus
AGAEVSETWEEHCDW

SEQ ID NO: 30383 - protein, 15 aa, BK virus
GAEVSETWEEHCDWD

SEQ ID NO: 30384 - protein, 15 aa, BK virus
AEVSETWEEHCDWDS

SEQ ID NO: 30385 - protein, 15 aa, BK virus
EVSETWEEHCDWDSV

SEQ ID NO: 30386 - protein, 15 aa, BK virus
VSETWEEHCDWDSVL

SEQ ID NO: 30387 - protein, 15 aa, BK virus
SETWEEHCDWDSVLD

SEQ ID NO: 30388 - protein, 15 aa, BK virus
ETWEEHCDWDSVLDP

SEQ ID NO: 30389 - protein, 15 aa, BK virus
TWEEHCDWDSVLDPC

SEQ ID NO: 30390 - protein, 15 aa, BK virus
WEEHCDWDSVLDPCP

SEQ ID NO: 30391 - protein, 15 aa, BK virus
EEHCDWDSVLDPCPE

SEQ ID NO: 30392 - protein, 15 aa, BK virus
EHCDWDSVLDPCPES

SEQ ID NO: 30393 - protein, 15 aa, BK virus
HCDWDSVLDPCPESS

SEQ ID NO: 30394 - protein, 15 aa, BK virus
CDWDSVLDPCPESSV

SEQ ID NO: 30395 - protein, 15 aa, BK virus
DWDSVLDPCPESSVS

SEQ ID NO: 30396 - protein, 15 aa, BK virus
WDSVLDPCPESSVSE

SEQ ID NO: 30397 - protein, 15 aa, BK virus
DSVLDPCPESSVSES

SEQ ID NO: 30398 - protein, 15 aa, BK virus
SVLDPCPESSVSESS

SEQ ID NO: 30399 - protein, 15 aa, BK virus
VLDPCPESSVSESSS

SEQ ID NO: 30400 - protein, 15 aa, BK virus
LDPCPESSVSESSSL

SEQ ID NO: 30401 - protein, 15 aa, BK virus
DPCPESSVSESSSLV

SEQ ID NO: 30402 - protein, 15 aa, BK virus
PCPESSVSESSSLVI

SEQ ID NO: 30403 - protein, 15 aa, BK virus
CPESSVSESSSLVIS

SEQ ID NO: 30404 - protein, 15 aa, BK virus
PESSVSESSSLVISR

SEQ ID NO: 30405 - protein, 15 aa, BK virus
ESSVSESSSLVISRI

SEQ ID NO: 30406 - protein, 15 aa, BK virus
SSVSESSSLVISRIH

SEQ ID NO: 30407 - protein, 15 aa, BK virus
SVSESSSLVISRIHF

SEQ ID NO: 30408 - protein, 15 aa, BK virus
VSESSSLVISRIHFP

SEQ ID NO: 30409 - protein, 15 aa, BK virus
SESSSLVISRIHFPM

SEQ ID NO: 30410 - protein, 15 aa, BK virus
ESSSLVISRIHFPMH

SEQ ID NO: 30411 - protein, 15 aa, BK virus
SSSLVISRIHFPMHI

SEQ ID NO: 30412 - protein, 15 aa, BK virus
SSLVISRIHFPMHIL

SEQ ID NO: 30413 - protein, 15 aa, BK virus
SLVISRIHFPMHILY

SEQ ID NO: 30414 - protein, 15 aa, BK virus
LVISRIHFPMHILYF

SEQ ID NO: 30415 - protein, 15 aa, BK virus
VISRIHFPMHILYFI

SEQ ID NO: 30416 - protein, 15 aa, BK virus
ISRIHFPMHILYFIL

SEQ ID NO: 30417 - protein, 15 aa, BK virus
SRIHFPMHILYFILE

SEQ ID NO: 30418 - protein, 15 aa, BK virus
RIHFPMHILYFILEK

SEQ ID NO: 30419 - protein, 15 aa, BK virus
IHFPMHILYFILEKV

SEQ ID NO: 30420 - protein, 15 aa, BK virus
HFPMHILYFILEKVY

SEQ ID NO: 30421 - protein, 15 aa, BK virus
FPMHILYFILEKVYI

SEQ ID NO: 30422 - protein, 15 aa, BK virus
PMHILYFILEKVYIL

SEQ ID NO: 30423 - protein, 15 aa, BK virus
MHILYFILEKVYILI

SEQ ID NO: 30424 - protein, 15 aa, BK virus
HILYFILEKVYILIS

SEQ ID NO: 30425 - protein, 15 aa, BK virus
ILYFILEKVYILISE

SEQ ID NO: 30426 - protein, 15 aa, BK virus
LYFILEKVYILISES

SEQ ID NO: 30427 - protein, 15 aa, BK virus
YFILEKVYILISESS

SEQ ID NO: 30428 - protein, 15 aa, BK virus
FILEKVYILISESSL

SEQ ID NO: 30429 - protein, 15 aa, BK virus
ILEKVYILISESSLS

SEQ ID NO: 30430 - protein, 15 aa, BK virus
LEKVYILISESSLSF

SEQ ID NO: 30431 - protein, 15 aa, BK virus
EKVYILISESSLSFH

SEQ ID NO: 30432 - protein, 15 aa, BK virus
KVYILISESSLSFHS

SEQ ID NO: 30433 - protein, 15 aa, BK virus
VYILISESSLSFHST

SEQ ID NO: 30434 - protein, 15 aa, BK virus
YILISESSLSFHSTI

SEQ ID NO: 30435 - protein, 15 aa, BK virus
ILISESSLSFHSTIL

SEQ ID NO: 30436 - protein, 15 aa, BK virus
LISESSLSFHSTILD

SEQ ID NO: 30437 - protein, 15 aa, BK virus
ISESSLSFHSTILDC

SEQ ID NO: 30438 - protein, 15 aa, BK virus
SESSLSFHSTILDCI

SEQ ID NO: 30439 - protein, 15 aa, BK virus
ESSLSFHSTILDCIS

SEQ ID NO: 30440 - protein, 15 aa, BK virus
SSLSFHSTILDCISV

SEQ ID NO: 30441 - protein, 15 aa, BK virus
SLSFHSTILDCISVA

SEQ ID NO: 30442 - protein, 15 aa, BK virus
LSFHSTILDCISVAK

SEQ ID NO: 30443 - protein, 15 aa, BK virus
SFHSTILDCISVAKS

SEQ ID NO: 30444 - protein, 15 aa, BK virus
FHSTILDCISVAKSA

SEQ ID NO: 30445 - protein, 15 aa, BK virus
HSTILDCISVAKSAT

SEQ ID NO: 30446 - protein, 15 aa, BK virus
STILDCISVAKSATG

SEQ ID NO: 30447 - protein, 15 aa, BK virus
TILDCISVAKSATGL

SEQ ID NO: 30448 - protein, 15 aa, BK virus
ILDCISVAKSATGLN

SEQ ID NO: 30449 - protein, 15 aa, BK virus
LDCISVAKSATGLNQ

SEQ ID NO: 30450 - protein, 15 aa, BK virus
DCISVAKSATGLNQI

SEQ ID NO: 30451 - protein, 15 aa, BK virus
CISVAKSATGLNQIS

SEQ ID NO: 30452 - protein, 15 aa, BK virus
ISVAKSATGLNQISS

SEQ ID NO: 30453 - protein, 15 aa, BK virus
SVAKSATGLNQISSS

SEQ ID NO: 30454 - protein, 15 aa, BK virus
VAKSATGLNQISSSN

SEQ ID NO: 30455 - protein, 15 aa, BK virus
AKSATGLNQISSSNK

SEQ ID NO: 30456 - protein, 15 aa, BK virus
KSATGLNQISSSNKV

SEQ ID NO: 30457 - protein, 15 aa, BK virus
SATGLNQISSSNKVI

SEQ ID NO: 30458 - protein, 15 aa, BK virus
ATGLNQISSSNKVIP

SEQ ID NO: 30459 - protein, 15 aa, BK virus
TGLNQISSSNKVIPL

SEQ ID NO: 30460 - protein, 15 aa, BK virus
GLNQISSSNKVIPLC

SEQ ID NO: 30461 - protein, 15 aa, BK virus
LNQISSSNKVIPLCK

SEQ ID NO: 30462 - protein, 15 aa, BK virus
NQISSSNKVIPLCKI

SEQ ID NO: 30463 - protein, 15 aa, BK virus
QISSSNKVIPLCKIL

SEQ ID NO: 30464 - protein, 15 aa, BK virus
ISSSNKVIPLCKILF

SEQ ID NO: 30465 - protein, 15 aa, BK virus
SSSNKVIPLCKILFS

SEQ ID NO: 30466 - protein, 15 aa, BK virus
SSNKVIPLCKILFSS

SEQ ID NO: 30467 - protein, 15 aa, BK virus
SNKVIPLCKILFSSK

SEQ ID NO: 30468 - protein, 15 aa, BK virus
NKVIPLCKILFSSKN

SEQ ID NO: 30469 - protein, 15 aa, BK virus
KVIPLCKILFSSKNS

SEQ ID NO: 30470 - protein, 15 aa, BK virus
VIPLCKILFSSKNSE

SEQ ID NO: 30471 - protein, 15 aa, BK virus
IPLCKILFSSKNSEF

SEQ ID NO: 30472 - protein, 15 aa, BK virus
PLCKILFSSKNSEFC

SEQ ID NO: 30473 - protein, 15 aa, BK virus
LCKILFSSKNSEFCK

SEQ ID NO: 30474 - protein, 15 aa, BK virus
CKILFSSKNSEFCKD

SEQ ID NO: 30475 - protein, 15 aa, BK virus
KILFSSKNSEFCKDF

SEQ ID NO: 30476 - protein, 15 aa, BK virus
ILFSSKNSEFCKDFL

SEQ ID NO: 30477 - protein, 15 aa, BK virus
LFSSKNSEFCKDFLK

SEQ ID NO: 30478 - protein, 15 aa, BK virus
FSSKNSEFCKDFLKY

SEQ ID NO: 30479 - protein, 15 aa, BK virus
SSKNSEFCKDFLKYI

SEQ ID NO: 30480 - protein, 15 aa, BK virus
SKNSEFCKDFLKYIL

SEQ ID NO: 30481 - protein, 15 aa, BK virus
KNSEFCKDFLKYILG

SEQ ID NO: 30482 - protein, 15 aa, BK virus
NSEFCKDFLKYILGL

SEQ ID NO: 30483 - protein, 15 aa, BK virus
SEFCKDFLKYILGLK

SEQ ID NO: 30484 - protein, 15 aa, BK virus
EFCKDFLKYILGLKS

SEQ ID NO: 30485 - protein, 15 aa, BK virus
FCKDFLKYILGLKSI

SEQ ID NO: 30486 - protein, 15 aa, BK virus
CKDFLKYILGLKSIC

SEQ ID NO: 30487 - protein, 15 aa, BK virus
KDFLKYILGLKSICL

SEQ ID NO: 30488 - protein, 15 aa, BK virus
DFLKYILGLKSICLT

SEQ ID NO: 30489 - protein, 15 aa, BK virus
FLKYILGLKSICLTN

SEQ ID NO: 30490 - protein, 15 aa, BK virus
LKYILGLKSICLTNL

SEQ ID NO: 30491 - protein, 15 aa, BK virus
KYILGLKSICLTNLA

SEQ ID NO: 30492 - protein, 15 aa, BK virus
YILGLKSICLTNLAC

SEQ ID NO: 30493 - protein, 15 aa, BK virus
ILGLKSICLTNLACR

SEQ ID NO: 30494 - protein, 15 aa, BK virus
LGLKSICLTNLACRV

SEQ ID NO: 30495 - protein, 15 aa, BK virus
GLKSICLTNLACRVL

SEQ ID NO: 30496 - protein, 15 aa, BK virus
LKSICLTNLACRVLG

SEQ ID NO: 30497 - protein, 15 aa, BK virus
KSICLTNLACRVLGT

SEQ ID NO: 30498 - protein, 15 aa, BK virus
SICLTNLACRVLGTG

SEQ ID NO: 30499 - protein, 15 aa, BK virus
ICLTNLACRVLGTGY

SEQ ID NO: 30500 - protein, 15 aa, BK virus
CLTNLACRVLGTGYS

SEQ ID NO: 30501 - protein, 15 aa, BK virus
LTNLACRVLGTGYSF

SEQ ID NO: 30502 - protein, 15 aa, BK virus
TNLACRVLGTGYSFI

SEQ ID NO: 30503 - protein, 15 aa, BK virus
NLACRVLGTGYSFIV

SEQ ID NO: 30504 - protein, 15 aa, BK virus
LACRVLGTGYSFIVT

SEQ ID NO: 30505 - protein, 15 aa, BK virus
ACRVLGTGYSFIVTK

SEQ ID NO: 30506 - protein, 15 aa, BK virus
CRVLGTGYSFIVTKP

SEQ ID NO: 30507 - protein, 15 aa, BK virus
RVLGTGYSFIVTKPG

SEQ ID NO: 30508 - protein, 15 aa, BK virus
VLGTGYSFIVTKPGG

SEQ ID NO: 30509 - protein, 15 aa, BK virus
LGTGYSFIVTKPGGN

SEQ ID NO: 30510 - protein, 15 aa, BK virus
GTGYSFIVTKPGGNI

SEQ ID NO: 30511 - protein, 15 aa, BK virus
TGYSFIVTKPGGNIW

SEQ ID NO: 30512 - protein, 15 aa, BK virus
GYSFIVTKPGGNIWV

SEQ ID NO: 30513 - protein, 15 aa, BK virus
YSFIVTKPGGNIWVL

SEQ ID NO: 30514 - protein, 15 aa, BK virus
SFIVTKPGGNIWVLL

SEQ ID NO: 30515 - protein, 15 aa, BK virus
FIVTKPGGNIWVLLF

SEQ ID NO: 30516 - protein, 15 aa, BK virus
IVTKPGGNIWVLLFK

SEQ ID NO: 30517 - protein, 15 aa, BK virus
VTKPGGNIWVLLFKC

SEQ ID NO: 30518 - protein, 15 aa, BK virus
TKPGGNIWVLLFKCF

SEQ ID NO: 30519 - protein, 15 aa, BK virus
KPGGNIWVLLFKCFF

SEQ ID NO: 30520 - protein, 15 aa, BK virus
PGGNIWVLLFKCFFS

SEQ ID NO: 30521 - protein, 15 aa, BK virus
GGNIWVLLFKCFFSK

SEQ ID NO: 30522 - protein, 15 aa, BK virus
GNIWVLLFKCFFSKF

SEQ ID NO: 30523 - protein, 15 aa, BK virus
NIWVLLFKCFFSKFT

SEQ ID NO: 30524 - protein, 15 aa, BK virus
IWVLLFKCFFSKFTL

SEQ ID NO: 30525 - protein, 15 aa, BK virus
WVLLFKCFFSKFTLT

SEQ ID NO: 30526 - protein, 15 aa, BK virus
VLLFKCFFSKFTLTL

SEQ ID NO: 30527 - protein, 15 aa, BK virus
LLFKCFFSKFTLTLP

SEQ ID NO: 30528 - protein, 15 aa, BK virus
LFKCFFSKFTLTLPS

SEQ ID NO: 30529 - protein, 15 aa, BK virus
FKCFFSKFTLTLPSK

SEQ ID NO: 30530 - protein, 15 aa, BK virus
SLKLSKLFIPCPEGK

SEQ ID NO: 30531 - protein, 15 aa, BK virus
LKLSKLFIPCPEGKS

SEQ ID NO: 30532 - protein, 15 aa, BK virus
KLSKLFIPCPEGKSF

SEQ ID NO: 30533 - protein, 15 aa, BK virus
LSKLFIPCPEGKSFD

SEQ ID NO: 30534 - protein, 15 aa, BK virus
SKLFIPCPEGKSFDS

SEQ ID NO: 30535 - protein, 15 aa, BK virus
KLFIPCPEGKSFDSA

SEQ ID NO: 30536 - protein, 15 aa, BK virus
LFIPCPEGKSFDSAP

SEQ ID NO: 30537 - protein, 15 aa, BK virus
FIPCPEGKSFDSAPV

SEQ ID NO: 30538 - protein, 15 aa, BK virus
IPCPEGKSFDSAPVP

SEQ ID NO: 30539 - protein, 15 aa, BK virus
PCPEGKSFDSAPVPF

SEQ ID NO: 30540 - protein, 15 aa, BK virus
CPEGKSFDSAPVPFT

SEQ ID NO: 30541 - protein, 15 aa, BK virus
PEGKSFDSAPVPFTS

SEQ ID NO: 30542 - protein, 15 aa, BK virus
EGKSFDSAPVPFTSS

SEQ ID NO: 30543 - protein, 15 aa, BK virus
GKSFDSAPVPFTSSK

SEQ ID NO: 30544 - protein, 15 aa, BK virus
KSFDSAPVPFTSSKT

SEQ ID NO: 30545 - protein, 15 aa, BK virus
SFDSAPVPFTSSKTT

SEQ ID NO: 30546 - protein, 15 aa, BK virus
FDSAPVPFTSSKTTM

SEQ ID NO: 30547 - protein, 15 aa, BK virus
DSAPVPFTSSKTTMY

SEQ ID NO: 30548 - protein, 15 aa, BK virus
SIATPSSKVSLSMGR

SEQ ID NO: 30549 - protein, 15 aa, BK virus
IATPSSKVSLSMGRF

SEQ ID NO: 30550 - protein, 15 aa, BK virus
ATPSSKVSLSMGRFT

SEQ ID NO: 30551 - protein, 15 aa, BK virus
TPSSKVSLSMGRFTF

SEQ ID NO: 30552 - protein, 15 aa, BK virus
PSSKVSLSMGRFTFK

SEQ ID NO: 30553 - protein, 15 aa, BK virus
SSKVSLSMGRFTFKA

SEQ ID NO: 30554 - protein, 15 aa, BK virus
SKVSLSMGRFTFKAL

SEQ ID NO: 30555 - protein, 15 aa, BK virus
KVSLSMGRFTFKALP

SEQ ID NO: 30556 - protein, 15 aa, BK virus
VSLSMGRFTFKALPP

SEQ ID NO: 30557 - protein, 15 aa, BK virus
SLSMGRFTFKALPPH

SEQ ID NO: 30558 - protein, 15 aa, BK virus
LSMGRFTFKALPPHK

SEQ ID NO: 30559 - protein, 15 aa, BK virus
SMGRFTFKALPPHKS

SEQ ID NO: 30560 - protein, 15 aa, BK virus
MGRFTFKALPPHKSN

SEQ ID NO: 30561 - protein, 15 aa, BK virus
GRFTFKALPPHKSNN

SEQ ID NO: 30562 - protein, 15 aa, BK virus
RFTFKALPPHKSNNP

SEQ ID NO: 30563 - protein, 15 aa, BK virus
FTFKALPPHKSNNPA

SEQ ID NO: 30564 - protein, 15 aa, BK virus
TFKALPPHKSNNPAA

SEQ ID NO: 30565 - protein, 15 aa, BK virus
FKALPPHKSNNPAAS

SEQ ID NO: 30566 - protein, 15 aa, BK virus
KALPPHKSNNPAASV

SEQ ID NO: 30567 - protein, 15 aa, BK virus
ALPPHKSNNPAASVV

SEQ ID NO: 30568 - protein, 15 aa, BK virus
LPPHKSNNPAASVVF

SEQ ID NO: 30569 - protein, 15 aa, BK virus
PPHKSNNPAASVVFP

SEQ ID NO: 30570 - protein, 15 aa, BK virus
PHKSNNPAASVVFPL

SEQ ID NO: 30571 - protein, 15 aa, BK virus
HKSNNPAASVVFPLS

SEQ ID NO: 30572 - protein, 15 aa, BK virus
KSNNPAASVVFPLSM

SEQ ID NO: 30573 - protein, 15 aa, BK virus
SNNPAASVVFPLSMG

SEQ ID NO: 30574 - protein, 15 aa, BK virus
NNPAASVVFPLSMGP

SEQ ID NO: 30575 - protein, 15 aa, BK virus
NPAASVVFPLSMGPL

SEQ ID NO: 30576 - protein, 15 aa, BK virus
PAASVVFPLSMGPLN

SEQ ID NO: 30577 - protein, 15 aa, BK virus
AASVVFPLSMGPLNN

SEQ ID NO: 30578 - protein, 15 aa, BK virus
ASVVFPLSMGPLNNQ

SEQ ID NO: 30579 - protein, 15 aa, BK virus
SVVFPLSMGPLNNQY

SEQ ID NO: 30580 - protein, 15 aa, BK virus
VVFPLSMGPLNNQYL

SEQ ID NO: 30581 - protein, 15 aa, BK virus
VFPLSMGPLNNQYLL

SEQ ID NO: 30582 - protein, 15 aa, BK virus
FPLSMGPLNNQYLLL

SEQ ID NO: 30583 - protein, 15 aa, BK virus
PLSMGPLNNQYLLLG

SEQ ID NO: 30584 - protein, 15 aa, BK virus
LSMGPLNNQYLLLGT

SEQ ID NO: 30585 - protein, 15 aa, BK virus
SMGPLNNQYLLLGTL

SEQ ID NO: 30586 - protein, 15 aa, BK virus
MGPLNNQYLLLGTLK

SEQ ID NO: 30587 - protein, 15 aa, BK virus
GPLNNQYLLLGTLKT

SEQ ID NO: 30588 - protein, 15 aa, BK virus
PLNNQYLLLGTLKTI

SEQ ID NO: 30589 - protein, 15 aa, BK virus
LNNQYLLLGTLKTIQ

SEQ ID NO: 30590 - protein, 15 aa, BK virus
NNQYLLLGTLKTIQC

SEQ ID NO: 30591 - protein, 15 aa, BK virus
NQYLLLGTLKTIQCK

SEQ ID NO: 30592 - protein, 15 aa, BK virus
QYLLLGTLKTIQCKK

SEQ ID NO: 30593 - protein, 15 aa, BK virus
YLLLGTLKTIQCKKS

SEQ ID NO: 30594 - protein, 15 aa, BK virus
LLLGTLKTIQCKKSN

SEQ ID NO: 30595 - protein, 15 aa, BK virus
LLGTLKTIQCKKSNI

SEQ ID NO: 30596 - protein, 15 aa, BK virus
LGTLKTIQCKKSNIT

SEQ ID NO: 30597 - protein, 15 aa, BK virus
GTLKTIQCKKSNITE

SEQ ID NO: 30598 - protein, 15 aa, BK virus
TLKTIQCKKSNITES

SEQ ID NO: 30599 - protein, 15 aa, BK virus
LKTIQCKKSNITESI

SEQ ID NO: 30600 - protein, 15 aa, BK virus
KTIQCKKSNITESIL

SEQ ID NO: 30601 - protein, 15 aa, BK virus
TIQCKKSNITESILG

SEQ ID NO: 30602 - protein, 15 aa, BK virus
IQCKKSNITESILGS

SEQ ID NO: 30603 - protein, 15 aa, BK virus
QCKKSNITESILGSK

SEQ ID NO: 30604 - protein, 15 aa, BK virus
CKKSNITESILGSKQ

SEQ ID NO: 30605 - protein, 15 aa, BK virus
KKSNITESILGSKQC

SEQ ID NO: 30606 - protein, 15 aa, BK virus
KSNITESILGSKQCS

SEQ ID NO: 30607 - protein, 15 aa, BK virus
SNITESILGSKQCSQ

SEQ ID NO: 30608 - protein, 15 aa, BK virus
NITESILGSKQCSQA

SEQ ID NO: 30609 - protein, 15 aa, BK virus
ITESILGSKQCSQAT

SEQ ID NO: 30610 - protein, 15 aa, BK virus
TESILGSKQCSQATP

SEQ ID NO: 30611 - protein, 15 aa, BK virus
ESILGSKQCSQATPA

SEQ ID NO: 30612 - protein, 15 aa, BK virus
SILGSKQCSQATPAI

SEQ ID NO: 30613 - protein, 15 aa, BK virus
ILGSKQCSQATPAIY

SEQ ID NO: 30614 - protein, 15 aa, BK virus
LGSKQCSQATPAIYC

SEQ ID NO: 30615 - protein, 15 aa, BK virus
GSKQCSQATPAIYCS

SEQ ID NO: 30616 - protein, 15 aa, BK virus
SKQCSQATPAIYCSS

SEQ ID NO: 30617 - protein, 15 aa, BK virus
KQCSQATPAIYCSST

SEQ ID NO: 30618 - protein, 15 aa, BK virus
QCSQATPAIYCSSTA

SEQ ID NO: 30619 - protein, 15 aa, BK virus
CSQATPAIYCSSTAF

SEQ ID NO: 30620 - protein, 15 aa, BK virus
SQATPAIYCSSTAFP

SEQ ID NO: 30621 - protein, 15 aa, BK virus
RVSTLFLAKTVSTAC

SEQ ID NO: 30622 - protein, 15 aa, BK virus
FLLSAKIIAFAKCFS

SEQ ID NO: 30623 - protein, 15 aa, BK virus
NSKYIPNNKNTSSHF

SEQ ID NO: 30624 - protein, 15 aa, BK virus
SKYIPNNKNTSSHFV

SEQ ID NO: 30625 - protein, 15 aa, BK virus
KYIPNNKNTSSHFVS

SEQ ID NO: 30626 - protein, 15 aa, BK virus
YIPNNKNTSSHFVST

SEQ ID NO: 30627 - protein, 15 aa, BK virus
IPNNKNTSSHFVSTA

SEQ ID NO: 30628 - protein, 15 aa, BK virus
PNNKNTSSHFVSTAY

SEQ ID NO: 30629 - protein, 15 aa, BK virus
NNKNTSSHFVSTAYS

SEQ ID NO: 30630 - protein, 15 aa, BK virus
NKNTSSHFVSTAYSV

SEQ ID NO: 30631 - protein, 15 aa, BK virus
KNTSSHFVSTAYSVI

SEQ ID NO: 30632 - protein, 15 aa, BK virus
NTSSHFVSTAYSVIN

SEQ ID NO: 30633 - protein, 15 aa, BK virus
TSSHFVSTAYSVINF

SEQ ID NO: 30634 - protein, 15 aa, BK virus
SSHFVSTAYSVINFQ

SEQ ID NO: 30635 - protein, 15 aa, BK virus
SHFVSTAYSVINFQD

SEQ ID NO: 30636 - protein, 15 aa, BK virus
HFVSTAYSVINFQDT

SEQ ID NO: 30637 - protein, 15 aa, BK virus
FVSTAYSVINFQDTC

SEQ ID NO: 30638 - protein, 15 aa, BK virus
VSTAYSVINFQDTCF

SEQ ID NO: 30639 - protein, 15 aa, BK virus
STAYSVINFQDTCFV

SEQ ID NO: 30640 - protein, 15 aa, BK virus
TAYSVINFQDTCFVS

SEQ ID NO: 30641 - protein, 15 aa, BK virus
AYSVINFQDTCFVSS

SEQ ID NO: 30642 - protein, 15 aa, BK virus
YSVINFQDTCFVSSG

SEQ ID NO: 30643 - protein, 15 aa, BK virus
SVINFQDTCFVSSGS

SEQ ID NO: 30644 - protein, 15 aa, BK virus
VINFQDTCFVSSGSS

SEQ ID NO: 30645 - protein, 15 aa, BK virus
INFQDTCFVSSGSSG

SEQ ID NO: 30646 - protein, 15 aa, BK virus
NFQDTCFVSSGSSGL

SEQ ID NO: 30647 - protein, 15 aa, BK virus
FQDTCFVSSGSSGLK

SEQ ID NO: 30648 - protein, 15 aa, BK virus
QDTCFVSSGSSGLKS

SEQ ID NO: 30649 - protein, 15 aa, BK virus
DTCFVSSGSSGLKSC

SEQ ID NO: 30650 - protein, 15 aa, BK virus
TCFVSSGSSGLKSCS

SEQ ID NO: 30651 - protein, 15 aa, BK virus
CFVSSGSSGLKSCSF

SEQ ID NO: 30652 - protein, 15 aa, BK virus
FVSSGSSGLKSCSFK

SEQ ID NO: 30653 - protein, 15 aa, BK virus
VSSGSSGLKSCSFKP

SEQ ID NO: 30654 - protein, 15 aa, BK virus
SSGSSGLKSCSFKPP

SEQ ID NO: 30655 - protein, 15 aa, BK virus
MLSSIVWYGSLVKAL

SEQ ID NO: 30656 - protein, 15 aa, BK virus
LSSIVWYGSLVKALY

SEQ ID NO: 30657 - protein, 15 aa, BK virus
SSIVWYGSLVKALYS

SEQ ID NO: 30658 - protein, 15 aa, BK virus
SIVWYGSLVKALYSK

SEQ ID NO: 30659 - protein, 15 aa, BK virus
IVWYGSLVKALYSKY

SEQ ID NO: 30660 - protein, 15 aa, BK virus
VWYGSLVKALYSKYS

SEQ ID NO: 30661 - protein, 15 aa, BK virus
WYGSLVKALYSKYSL

SEQ ID NO: 30662 - protein, 15 aa, BK virus
YGSLVKALYSKYSLL

SEQ ID NO: 30663 - protein, 15 aa, BK virus
GSLVKALYSKYSLLT

SEQ ID NO: 30664 - protein, 15 aa, BK virus
SLVKALYSKYSLLTP

SEQ ID NO: 30665 - protein, 15 aa, BK virus
LVKALYSKYSLLTPL

SEQ ID NO: 30666 - protein, 15 aa, BK virus
VKALYSKYSLLTPLQ

SEQ ID NO: 30667 - protein, 15 aa, BK virus
KALYSKYSLLTPLQI

SEQ ID NO: 30668 - protein, 15 aa, BK virus
ALYSKYSLLTPLQIK

SEQ ID NO: 30669 - protein, 15 aa, BK virus
LYSKYSLLTPLQIKK

SEQ ID NO: 30670 - protein, 15 aa, BK virus
YSKYSLLTPLQIKKL

SEQ ID NO: 30671 - protein, 15 aa, BK virus
SKYSLLTPLQIKKLK

SEQ ID NO: 30672 - protein, 15 aa, BK virus
KYSLLTPLQIKKLKV

SEQ ID NO: 30673 - protein, 15 aa, BK virus
YSLLTPLQIKKLKVH

SEQ ID NO: 30674 - protein, 15 aa, BK virus
SLLTPLQIKKLKVHS

SEQ ID NO: 30675 - protein, 15 aa, BK virus
LLTPLQIKKLKVHSF

SEQ ID NO: 30676 - protein, 15 aa, BK virus
QKLLIAETLCLCGVK

SEQ ID NO: 30677 - protein, 15 aa, BK virus
KLLIAETLCLCGVKK

SEQ ID NO: 30678 - protein, 15 aa, BK virus
LLIAETLCLCGVKKN

SEQ ID NO: 30679 - protein, 15 aa, BK virus
LIAETLCLCGVKKNI

SEQ ID NO: 30680 - protein, 15 aa, BK virus
IAETLCLCGVKKNII

SEQ ID NO: 30681 - protein, 15 aa, BK virus
AETLCLCGVKKNIIL

SEQ ID NO: 30682 - protein, 15 aa, BK virus
ETLCLCGVKKNIILC

SEQ ID NO: 30683 - protein, 15 aa, BK virus
TLCLCGVKKNIILCP

SEQ ID NO: 30684 - protein, 15 aa, BK virus
LCLCGVKKNIILCPA

SEQ ID NO: 30685 - protein, 15 aa, BK virus
CLCGVKKNIILCPAH

SEQ ID NO: 30686 - protein, 15 aa, BK virus
LCGVKKNIILCPAHM

SEQ ID NO: 30687 - protein, 15 aa, BK virus
CGVKKNIILCPAHMC

SEQ ID NO: 30688 - protein, 15 aa, BK virus
GVKKNIILCPAHMCL

SEQ ID NO: 30689 - protein, 15 aa, BK virus
VKKNIILCPAHMCLL

SEQ ID NO: 30690 - protein, 15 aa, BK virus
KKNIILCPAHMCLLI

SEQ ID NO: 30691 - protein, 15 aa, BK virus
KNIILCPAHMCLLIK

SEQ ID NO: 30692 - protein, 15 aa, BK virus
NIILCPAHMCLLIKV

SEQ ID NO: 30693 - protein, 15 aa, BK virus
IILCPAHMCLLIKVT

SEQ ID NO: 30694 - protein, 15 aa, BK virus
ILCPAHMCLLIKVTE

SEQ ID NO: 30695 - protein, 15 aa, BK virus
LCPAHMCLLIKVTEY

SEQ ID NO: 30696 - protein, 15 aa, BK virus
CPAHMCLLIKVTEYF

SEQ ID NO: 30697 - protein, 15 aa, BK virus
PAHMCLLIKVTEYFS

SEQ ID NO: 30698 - protein, 15 aa, BK virus
AHMCLLIKVTEYFSI

SEQ ID NO: 30699 - protein, 15 aa, BK virus
HMCLLIKVTEYFSIS

SEQ ID NO: 30700 - protein, 15 aa, BK virus
MCLLIKVTEYFSISF

SEQ ID NO: 30701 - protein, 15 aa, BK virus
CLLIKVTEYFSISFL

SEQ ID NO: 30702 - protein, 15 aa, BK virus
LLIKVTEYFSISFLY

SEQ ID NO: 30703 - protein, 15 aa, BK virus
LIKVTEYFSISFLYR

SEQ ID NO: 30704 - protein, 15 aa, BK virus
IKVTEYFSISFLYRI

SEQ ID NO: 30705 - protein, 15 aa, BK virus
AFSLVVYTAKQARVL

SEQ ID NO: 30706 - protein, 15 aa, BK virus
FSLVVYTAKQARVLL

SEQ ID NO: 30707 - protein, 15 aa, BK virus
SLVVYTAKQARVLLL

SEQ ID NO: 30708 - protein, 15 aa, BK virus
LVVYTAKQARVLLLN

SEQ ID NO: 30709 - protein, 15 aa, BK virus
VVYTAKQARVLLLNT

SEQ ID NO: 30710 - protein, 15 aa, BK virus
VYTAKQARVLLLNTA

SEQ ID NO: 30711 - protein, 15 aa, BK virus
LRNWCRSEGKSLGSS

SEQ ID NO: 30712 - protein, 15 aa, BK virus
RNWCRSEGKSLGSST

SEQ ID NO: 30713 - protein, 15 aa, BK virus
NWCRSEGKSLGSSTF

SEQ ID NO: 30714 - protein, 15 aa, BK virus
WCRSEGKSLGSSTFL

SEQ ID NO: 30715 - protein, 15 aa, BK virus
CRSEGKSLGSSTFLF

SEQ ID NO: 30716 - protein, 15 aa, BK virus
RSEGKSLGSSTFLFF

SEQ ID NO: 30717 - protein, 15 aa, BK virus
SEGKSLGSSTFLFFL

SEQ ID NO: 30718 - protein, 15 aa, BK virus
EGKSLGSSTFLFFLG

SEQ ID NO: 30719 - protein, 15 aa, BK virus
GKSLGSSTFLFFLGG

SEQ ID NO: 30720 - protein, 15 aa, BK virus
KSLGSSTFLFFLGGV

SEQ ID NO: 30721 - protein, 15 aa, BK virus
SLGSSTFLFFLGGVE

SEQ ID NO: 30722 - protein, 15 aa, BK virus
LGSSTFLFFLGGVEC

SEQ ID NO: 30723 - protein, 15 aa, BK virus
ESAVASSSLANISSW

SEQ ID NO: 30724 - protein, 15 aa, BK virus
SAVASSSLANISSWQ

SEQ ID NO: 30725 - protein, 15 aa, BK virus
AVASSSLANISSWQN

SEQ ID NO: 30726 - protein, 15 aa, BK virus
VASSSLANISSWQNK

SEQ ID NO: 30727 - protein, 15 aa, BK virus
ASSSLANISSWQNKS

SEQ ID NO: 30728 - protein, 15 aa, BK virus
SSSLANISSWQNKSS

SEQ ID NO: 30729 - protein, 15 aa, BK virus
SSLANISSWQNKSSS

SEQ ID NO: 30730 - protein, 15 aa, BK virus
SLANISSWQNKSSSH

SEQ ID NO: 30731 - protein, 15 aa, BK virus
LANISSWQNKSSSHF

SEQ ID NO: 30732 - protein, 15 aa, BK virus
ANISSWQNKSSSHFS

SEQ ID NO: 30733 - protein, 15 aa, BK virus
NISSWQNKSSSHFSL

SEQ ID NO: 30734 - protein, 15 aa, BK virus
ISSWQNKSSSHFSLK

SEQ ID NO: 30735 - protein, 15 aa, BK virus
SSWQNKSSSHFSLKE

SEQ ID NO: 30736 - protein, 15 aa, BK virus
SWQNKSSSHFSLKEL

SEQ ID NO: 30737 - protein, 15 aa, BK virus
WQNKSSSHFSLKELH

SEQ ID NO: 30738 - protein, 15 aa, BK virus
QNKSSSHFSLKELHQ

SEQ ID NO: 30739 - protein, 15 aa, BK virus
NKSSSHFSLKELHQD

SEQ ID NO: 30740 - protein, 15 aa, BK virus
KSSSHFSLKELHQDS

SEQ ID NO: 30741 - protein, 15 aa, BK virus
SSSHFSLKELHQDSH

SEQ ID NO: 30742 - protein, 15 aa, BK virus
SSHFSLKELHQDSHS

SEQ ID NO: 30743 - protein, 15 aa, BK virus
SHFSLKELHQDSHSS

SEQ ID NO: 30744 - protein, 15 aa, BK virus
HFSLKELHQDSHSSV

SEQ ID NO: 30745 - protein, 15 aa, BK virus
FSLKELHQDSHSSVP

SEQ ID NO: 30746 - protein, 15 aa, BK virus
VGTYKKNNYLGPFNI

SEQ ID NO: 30747 - protein, 15 aa, BK virus
GTYKKNNYLGPFNIL

SEQ ID NO: 30748 - protein, 15 aa, BK virus
TYKKNNYLGPFNILL

SEQ ID NO: 30749 - protein, 15 aa, BK virus
YKKNNYLGPFNILLF

SEQ ID NO: 30750 - protein, 15 aa, BK virus
KKNNYLGPFNILLFI

SEQ ID NO: 30751 - protein, 15 aa, BK virus
REFLQLFGPTIAEFL

SEQ ID NO: 30752 - protein, 15 aa, BK virus
EFLQLFGPTIAEFLQ

SEQ ID NO: 30753 - protein, 15 aa, BK virus
FLQLFGPTIAEFLQL

SEQ ID NO: 30754 - protein, 15 aa, BK virus
LQLFGPTIAEFLQLG

SEQ ID NO: 30755 - protein, 15 aa, BK virus
QLFGPTIAEFLQLGL

SEQ ID NO: 30756 - protein, 15 aa, BK virus
LFGPTIAEFLQLGLS

SEQ ID NO: 30757 - protein, 15 aa, BK virus
FGPTIAEFLQLGLSQ

SEQ ID NO: 30758 - protein, 15 aa, BK virus
GPTIAEFLQLGLSQT

SEQ ID NO: 30759 - protein, 15 aa, BK virus
PTIAEFLQLGLSQTT

SEQ ID NO: 30760 - protein, 15 aa, BK virus
TIAEFLQLGLSQTTV

SEQ ID NO: 30761 - protein, 15 aa, BK virus
SSQCSSNLSKPRALF

SEQ ID NO: 30762 - protein, 15 aa, BK virus
SQCSSNLSKPRALFL

SEQ ID NO: 30763 - protein, 15 aa, BK virus
QCSSNLSKPRALFLK

SEQ ID NO: 30764 - protein, 15 aa, BK virus
CSSNLSKPRALFLKI

SEQ ID NO: 30765 - protein, 15 aa, BK virus
SSNLSKPRALFLKIF

SEQ ID NO: 30766 - protein, 15 aa, BK virus
SNLSKPRALFLKIFY

SEQ ID NO: 30767 - protein, 15 aa, BK virus
NLSKPRALFLKIFYL

SEQ ID NO: 30768 - protein, 15 aa, BK virus
LSKPRALFLKIFYLN

SEQ ID NO: 30769 - protein, 15 aa, BK virus
SKPRALFLKIFYLNA

SEQ ID NO: 30770 - protein, 15 aa, BK virus
KPRALFLKIFYLNAL

SEQ ID NO: 30771 - protein, 15 aa, BK virus
PRALFLKIFYLNALI

SEQ ID NO: 30772 - protein, 15 aa, BK virus
ADIACKGSAQKAFWN

SEQ ID NO: 30773 - protein, 15 aa, BK virus
DIACKGSAQKAFWNK

SEQ ID NO: 30774 - protein, 15 aa, BK virus
AIPCSTGYLGKEENQ

SEQ ID NO: 30775 - protein, 15 aa, BK virus
IPCSTGYLGKEENQH

SEQ ID NO: 30776 - protein, 15 aa, BK virus
PCSTGYLGKEENQHK

SEQ ID NO: 30777 - protein, 15 aa, BK virus
CSTGYLGKEENQHKP

SEQ ID NO: 30778 - protein, 15 aa, BK virus
STGYLGKEENQHKPL

SEQ ID NO: 30779 - protein, 15 aa, BK virus
TGYLGKEENQHKPLS

SEQ ID NO: 30780 - protein, 15 aa, BK virus
GYLGKEENQHKPLSY

SEQ ID NO: 30781 - protein, 15 aa, BK virus
YLGKEENQHKPLSYS

SEQ ID NO: 30782 - protein, 15 aa, BK virus
LGKEENQHKPLSYSR

SEQ ID NO: 30783 - protein, 15 aa, BK virus
GKEENQHKPLSYSRF

SEQ ID NO: 30784 - protein, 15 aa, BK virus
KEENQHKPLSYSRFQ

SEQ ID NO: 30785 - protein, 15 aa, BK virus
EENQHKPLSYSRFQN

SEQ ID NO: 30786 - protein, 15 aa, BK virus
ENQHKPLSYSRFQNQ

SEQ ID NO: 30787 - protein, 15 aa, BK virus
NQHKPLSYSRFQNQA

SEQ ID NO: 30788 - protein, 15 aa, BK virus
QHKPLSYSRFQNQAD

SEQ ID NO: 30789 - protein, 15 aa, BK virus
HKPLSYSRFQNQADE

SEQ ID NO: 30790 - protein, 15 aa, BK virus
KPLSYSRFQNQADEL

SEQ ID NO: 30791 - protein, 15 aa, BK virus
PLSYSRFQNQADELP

SEQ ID NO: 30792 - protein, 15 aa, BK virus
LSYSRFQNQADELPL

SEQ ID NO: 30793 - protein, 15 aa, BK virus
SYSRFQNQADELPLH

SEQ ID NO: 30794 - protein, 15 aa, BK virus
YSRFQNQADELPLHP

SEQ ID NO: 30795 - protein, 15 aa, BK virus
SRFQNQADELPLHPA

SEQ ID NO: 30796 - protein, 15 aa, BK virus
RFQNQADELPLHPAP

SEQ ID NO: 30797 - protein, 15 aa, BK virus
FQNQADELPLHPAPF

SEQ ID NO: 30798 - protein, 15 aa, BK virus
QNQADELPLHPAPFF

SEQ ID NO: 30799 - protein, 15 aa, BK virus
NQADELPLHPAPFFY

SEQ ID NO: 30800 - protein, 15 aa, BK virus
QADELPLHPAPFFYT

SEQ ID NO: 30801 - protein, 15 aa, BK virus
ADELPLHPAPFFYTK

SEQ ID NO: 30802 - protein, 15 aa, BK virus
DELPLHPAPFFYTKY

SEQ ID NO: 30803 - protein, 15 aa, BK virus
ELPLHPAPFFYTKYS

SEQ ID NO: 30804 - protein, 15 aa, BK virus
LPLHPAPFFYTKYSF

SEQ ID NO: 30805 - protein, 15 aa, BK virus
PLHPAPFFYTKYSFS

SEQ ID NO: 30806 - protein, 15 aa, BK virus
LHPAPFFYTKYSFSS

SEQ ID NO: 30807 - protein, 15 aa, BK virus
HPAPFFYTKYSFSSF

SEQ ID NO: 30808 - protein, 15 aa, BK virus
PAPFFYTKYSFSSFY

SEQ ID NO: 30809 - protein, 15 aa, BK virus
APFFYTKYSFSSFYP

SEQ ID NO: 30810 - protein, 15 aa, BK virus
PFFYTKYSFSSFYPR

SEQ ID NO: 30811 - protein, 15 aa, BK virus
FFYTKYSFSSFYPRR

SEQ ID NO: 30812 - protein, 15 aa, BK virus
FYTKYSFSSFYPRRP

SEQ ID NO: 30813 - protein, 15 aa, BK virus
YTKYSFSSFYPRRPL

SEQ ID NO: 30814 - protein, 15 aa, BK virus
TKYSFSSFYPRRPLC

SEQ ID NO: 30815 - protein, 15 aa, BK virus
KYSFSSFYPRRPLCQ

SEQ ID NO: 30816 - protein, 15 aa, BK virus
YSFSSFYPRRPLCQG

SEQ ID NO: 30817 - protein, 15 aa, BK virus
SFSSFYPRRPLCQGE

SEQ ID NO: 30818 - protein, 15 aa, BK virus
FSSFYPRRPLCQGEI

SEQ ID NO: 30819 - protein, 15 aa, BK virus
SSFYPRRPLCQGEIP

SEQ ID NO: 30820 - protein, 15 aa, BK virus
SFYPRRPLCQGEIPY

SEQ ID NO: 30821 - protein, 15 aa, BK virus
FYPRRPLCQGEIPYT

SEQ ID NO: 30822 - protein, 15 aa, BK virus
YPRRPLCQGEIPYTS

SEQ ID NO: 30823 - protein, 15 aa, BK virus
PRRPLCQGEIPYTSL

SEQ ID NO: 30824 - protein, 15 aa, BK virus
RRPLCQGEIPYTSLN

SEQ ID NO: 30825 - protein, 15 aa, BK virus
RPLCQGEIPYTSLNK

SEQ ID NO: 30826 - protein, 15 aa, BK virus
PLCQGEIPYTSLNKL

SEQ ID NO: 30827 - protein, 15 aa, BK virus
LCQGEIPYTSLNKLF

SEQ ID NO: 30828 - protein, 15 aa, BK virus
CQGEIPYTSLNKLFS

SEQ ID NO: 30829 - protein, 15 aa, BK virus
QGEIPYTSLNKLFSL

SEQ ID NO: 30830 - protein, 15 aa, BK virus
GEIPYTSLNKLFSLR

SEQ ID NO: 30831 - protein, 15 aa, BK virus
EIPYTSLNKLFSLRE

SEQ ID NO: 30832 - protein, 15 aa, BK virus
IPYTSLNKLFSLRED

SEQ ID NO: 30833 - protein, 15 aa, BK virus
PYTSLNKLFSLREDF

SEQ ID NO: 30834 - protein, 15 aa, BK virus
YTSLNKLFSLREDFP

SEQ ID NO: 30835 - protein, 15 aa, BK virus
TSLNKLFSLREDFPR

SEQ ID NO: 30836 - protein, 15 aa, BK virus
SLNKLFSLREDFPRQ

SEQ ID NO: 30837 - protein, 15 aa, BK virus
LNKLFSLREDFPRQL

SEQ ID NO: 30838 - protein, 15 aa, BK virus
NKLFSLREDFPRQLF

SEQ ID NO: 30839 - protein, 15 aa, BK virus
KLFSLREDFPRQLFQ

SEQ ID NO: 30840 - protein, 15 aa, BK virus
LFSLREDFPRQLFQG

SEQ ID NO: 30841 - protein, 15 aa, BK virus
FSLREDFPRQLFQGL

SEQ ID NO: 30842 - protein, 15 aa, BK virus
SLREDFPRQLFQGLK

SEQ ID NO: 30843 - protein, 15 aa, BK virus
LREDFPRQLFQGLKG

SEQ ID NO: 30844 - protein, 15 aa, BK virus
REDFPRQLFQGLKGP

SEQ ID NO: 30845 - protein, 16 aa, BK virus
GFPQIVLLGLRKSLHT

SEQ ID NO: 30846 - protein, 16 aa, BK virus
FPQIVLLGLRKSLHTL

SEQ ID NO: 30847 - protein, 16 aa, BK virus
PQIVLLGLRKSLHTLT

SEQ ID NO: 30848 - protein, 16 aa, BK virus
QIVLLGLRKSLHTLTT

SEQ ID NO: 30849 - protein, 16 aa, BK virus
EKGWRQRRPRPLIYYK

SEQ ID NO: 30850 - protein, 16 aa, BK virus
KGWRQRRPRPLIYYKK

SEQ ID NO: 30851 - protein, 16 aa, BK virus
GWRQRRPRPLIYYKKK

SEQ ID NO: 30852 - protein, 16 aa, BK virus
WRQRRPRPLIYYKKKG

SEQ ID NO: 30853 - protein, 16 aa, BK virus
RQRRPRPLIYYKKKGH

SEQ ID NO: 30854 - protein, 16 aa, BK virus
QRRPRPLIYYKKKGHR

SEQ ID NO: 30855 - protein, 16 aa, BK virus
RRPRPLIYYKKKGHRE

SEQ ID NO: 30856 - protein, 16 aa, BK virus
RPRPLIYYKKKGHREE

SEQ ID NO: 30857 - protein, 16 aa, BK virus
PRPLIYYKKKGHREEL

SEQ ID NO: 30858 - protein, 16 aa, BK virus
RPLIYYKKKGHREELL

SEQ ID NO: 30859 - protein, 16 aa, BK virus
PLIYYKKKGHREELLT

SEQ ID NO: 30860 - protein, 16 aa, BK virus
LIYYKKKGHREELLTH

SEQ ID NO: 30861 - protein, 16 aa, BK virus
IYYKKKGHREELLTHG

SEQ ID NO: 30862 - protein, 16 aa, BK virus
YYKKKGHREELLTHGM

SEQ ID NO: 30863 - protein, 16 aa, BK virus
YKKKGHREELLTHGMQ

SEQ ID NO: 30864 - protein, 16 aa, BK virus
KKKGHREELLTHGMQP

SEQ ID NO: 30865 - protein, 16 aa, BK virus
KKGHREELLTHGMQPN

SEQ ID NO: 30866 - protein, 16 aa, BK virus
KGHREELLTHGMQPNH

SEQ ID NO: 30867 - protein, 16 aa, BK virus
GHREELLTHGMQPNHD

SEQ ID NO: 30868 - protein, 16 aa, BK virus
HREELLTHGMQPNHDL

SEQ ID NO: 30869 - protein, 16 aa, BK virus
REELLTHGMQPNHDLR

SEQ ID NO: 30870 - protein, 16 aa, BK virus
EELLTHGMQPNHDLRK

SEQ ID NO: 30871 - protein, 16 aa, BK virus
ELLTHGMQPNHDLRKE

SEQ ID NO: 30872 - protein, 16 aa, BK virus
LLTHGMQPNHDLRKES

SEQ ID NO: 30873 - protein, 16 aa, BK virus
LTHGMQPNHDLRKESA

SEQ ID NO: 30874 - protein, 16 aa, BK virus
LTGECSQTMTSGRKVH

SEQ ID NO: 30875 - protein, 16 aa, BK virus
TGECSQTMTSGRKVHD

SEQ ID NO: 30876 - protein, 16 aa, BK virus
GECSQTMTSGRKVHDS

SEQ ID NO: 30877 - protein, 16 aa, BK virus
ECSQTMTSGRKVHDSQ

SEQ ID NO: 30878 - protein, 16 aa, BK virus
CSQTMTSGRKVHDSQG

SEQ ID NO: 30879 - protein, 16 aa, BK virus
SQTMTSGRKVHDSQGG

SEQ ID NO: 30880 - protein, 16 aa, BK virus
QTMTSGRKVHDSQGGA

SEQ ID NO: 30881 - protein, 16 aa, BK virus
TMTSGRKVHDSQGGAA

SEQ ID NO: 30882 - protein, 16 aa, BK virus
MTSGRKVHDSQGGAAY

SEQ ID NO: 30883 - protein, 16 aa, BK virus
TSGRKVHDSQGGAAYP

SEQ ID NO: 30884 - protein, 16 aa, BK virus
SGRKVHDSQGGAAYPW

SEQ ID NO: 30885 - protein, 16 aa, BK virus
GRKVHDSQGGAAYPWN

SEQ ID NO: 30886 - protein, 16 aa, BK virus
RKVHDSQGGAAYPWNA

SEQ ID NO: 30887 - protein, 16 aa, BK virus
KVHDSQGGAAYPWNAA

SEQ ID NO: 30888 - protein, 16 aa, BK virus
VHDSQGGAAYPWNAAK

SEQ ID NO: 30889 - protein, 16 aa, BK virus
HDSQGGAAYPWNAAKP

SEQ ID NO: 30890 - protein, 16 aa, BK virus
PQEGKCMTDMFCEPRN

SEQ ID NO: 30891 - protein, 16 aa, BK virus
QEGKCMTDMFCEPRNL

SEQ ID NO: 30892 - protein, 16 aa, BK virus
EGKCMTDMFCEPRNLG

SEQ ID NO: 30893 - protein, 16 aa, BK virus
GKCMTDMFCEPRNLGL

SEQ ID NO: 30894 - protein, 16 aa, BK virus
KCMTDMFCEPRNLGLV

SEQ ID NO: 30895 - protein, 16 aa, BK virus
CMTDMFCEPRNLGLVP

SEQ ID NO: 30896 - protein, 16 aa, BK virus
MTDMFCEPRNLGLVPS

SEQ ID NO: 30897 - protein, 16 aa, BK virus
TGQRPWFCASCHDKLQ

SEQ ID NO: 30898 - protein, 16 aa, BK virus
KLVKPGLEQKKELRGF

SEQ ID NO: 30899 - protein, 16 aa, BK virus
LVKPGLEQKKELRGFL

SEQ ID NO: 30900 - protein, 16 aa, BK virus
VKPGLEQKKELRGFLF

SEQ ID NO: 30901 - protein, 16 aa, BK virus
KPGLEQKKELRGFLFL

SEQ ID NO: 30902 - protein, 16 aa, BK virus
PGLEQKKELRGFLFLF

SEQ ID NO: 30903 - protein, 16 aa, BK virus
VIPFFLYFQVHGCCSS

SEQ ID NO: 30904 - protein, 16 aa, BK virus
IPFFLYFQVHGCCSST

SEQ ID NO: 30905 - protein, 16 aa, BK virus
PFFLYFQVHGCCSSTF

SEQ ID NO: 30906 - protein, 16 aa, BK virus
FFLYFQVHGCCSSTFG

SEQ ID NO: 30907 - protein, 16 aa, BK virus
FLYFQVHGCCSSTFGG

SEQ ID NO: 30908 - protein, 16 aa, BK virus
LYFQVHGCCSSTFGGP

SEQ ID NO: 30909 - protein, 16 aa, BK virus
YFQVHGCCSSTFGGPS

SEQ ID NO: 30910 - protein, 16 aa, BK virus
FQVHGCCSSTFGGPSC

SEQ ID NO: 30911 - protein, 16 aa, BK virus
QVHGCCSSTFGGPSCQ

SEQ ID NO: 30912 - protein, 16 aa, BK virus
VHGCCSSTFGGPSCQC

SEQ ID NO: 30913 - protein, 16 aa, BK virus
HGCCSSTFGGPSCQCI

SEQ ID NO: 30914 - protein, 16 aa, BK virus
NCCWGGCCCYRSSNCI

SEQ ID NO: 30915 - protein, 16 aa, BK virus
CCWGGCCCYRSSNCIP

SEQ ID NO: 30916 - protein, 16 aa, BK virus
CWGGCCCYRSSNCIPC

SEQ ID NO: 30917 - protein, 16 aa, BK virus
WGGCCCYRSSNCIPCY

SEQ ID NO: 30918 - protein, 16 aa, BK virus
GGCCCYRSSNCIPCYC

SEQ ID NO: 30919 - protein, 16 aa, BK virus
GCCCYRSSNCIPCYCR

SEQ ID NO: 30920 - protein, 16 aa, BK virus
CCCYRSSNCIPCYCRG

SEQ ID NO: 30921 - protein, 16 aa, BK virus
CCYRSSNCIPCYCRGH

SEQ ID NO: 30922 - protein, 16 aa, BK virus
CYRSSNCIPCYCRGHN

SEQ ID NO: 30923 - protein, 16 aa, BK virus
YRSSNCIPCYCRGHNK

SEQ ID NO: 30924 - protein, 16 aa, BK virus
RSSNCIPCYCRGHNKY

SEQ ID NO: 30925 - protein, 16 aa, BK virus
SSNCIPCYCRGHNKYL

SEQ ID NO: 30926 - protein, 16 aa, BK virus
SNCIPCYCRGHNKYLR

SEQ ID NO: 30927 - protein, 16 aa, BK virus
NCIPCYCRGHNKYLRG

SEQ ID NO: 30928 - protein, 16 aa, BK virus
CIPCYCRGHNKYLRGY

SEQ ID NO: 30929 - protein, 16 aa, BK virus
IPCYCRGHNKYLRGYS

SEQ ID NO: 30930 - protein, 16 aa, BK virus
PCYCRGHNKYLRGYSC

SEQ ID NO: 30931 - protein, 16 aa, BK virus
CYCRGHNKYLRGYSCY

SEQ ID NO: 30932 - protein, 16 aa, BK virus
YCRGHNKYLRGYSCYR

SEQ ID NO: 30933 - protein, 16 aa, BK virus
CRGHNKYLRGYSCYRP

SEQ ID NO: 30934 - protein, 16 aa, BK virus
RGHNKYLRGYSCYRPN

SEQ ID NO: 30935 - protein, 16 aa, BK virus
GHNKYLRGYSCYRPNS

SEQ ID NO: 30936 - protein, 16 aa, BK virus
HNKYLRGYSCYRPNSS

SEQ ID NO: 30937 - protein, 16 aa, BK virus
NKYLRGYSCYRPNSSN

SEQ ID NO: 30938 - protein, 16 aa, BK virus
KYLRGYSCYRPNSSNI

SEQ ID NO: 30939 - protein, 16 aa, BK virus
YLRGYSCYRPNSSNIC

SEQ ID NO: 30940 - protein, 16 aa, BK virus
LRGYSCYRPNSSNICC

SEQ ID NO: 30941 - protein, 16 aa, BK virus
RGYSCYRPNSSNICCN

SEQ ID NO: 30942 - protein, 16 aa, BK virus
GYSCYRPNSSNICCNC

SEQ ID NO: 30943 - protein, 16 aa, BK virus
YSCYRPNSSNICCNCW

SEQ ID NO: 30944 - protein, 16 aa, BK virus
SCYRPNSSNICCNCWC

SEQ ID NO: 30945 - protein, 16 aa, BK virus
CYRPNSSNICCNCWCS

SEQ ID NO: 30946 - protein, 16 aa, BK virus
YRPNSSNICCNCWCSW

SEQ ID NO: 30947 - protein, 16 aa, BK virus
RPNSSNICCNCWCSWG

SEQ ID NO: 30948 - protein, 16 aa, BK virus
PNSSNICCNCWCSWGY

SEQ ID NO: 30949 - protein, 16 aa, BK virus
NSSNICCNCWCSWGYC

SEQ ID NO: 30950 - protein, 16 aa, BK virus
SSNICCNCWCSWGYCW

SEQ ID NO: 30951 - protein, 16 aa, BK virus
SNICCNCWCSWGYCWV

SEQ ID NO: 30952 - protein, 16 aa, BK virus
NICCNCWCSWGYCWVC

SEQ ID NO: 30953 - protein, 16 aa, BK virus
ICCNCWCSWGYCWVCC

SEQ ID NO: 30954 - protein, 16 aa, BK virus
CCNCWCSWGYCWVCCF

SEQ ID NO: 30955 - protein, 16 aa, BK virus
CNCWCSWGYCWVCCFN

SEQ ID NO: 30956 - protein, 16 aa, BK virus
NCWCSWGYCWVCCFNS

SEQ ID NO: 30957 - protein, 16 aa, BK virus
CWCSWGYCWVCCFNSN

SEQ ID NO: 30958 - protein, 16 aa, BK virus
WCSWGYCWVCCFNSNC

SEQ ID NO: 30959 - protein, 16 aa, BK virus
LGSQSFHCRPLSAIRH

SEQ ID NO: 30960 - protein, 16 aa, BK virus
GSQSFHCRPLSAIRHG

SEQ ID NO: 30961 - protein, 16 aa, BK virus
SQSFHCRPLSAIRHGF

SEQ ID NO: 30962 - protein, 16 aa, BK virus
QSFHCRPLSAIRHGFG

SEQ ID NO: 30963 - protein, 16 aa, BK virus
SFHCRPLSAIRHGFGI

SEQ ID NO: 30964 - protein, 16 aa, BK virus
FHCRPLSAIRHGFGIV

SEQ ID NO: 30965 - protein, 16 aa, BK virus
ALGSFFVCYYFPGFVA

SEQ ID NO: 30966 - protein, 16 aa, BK virus
LGSFFVCYYFPGFVAC

SEQ ID NO: 30967 - protein, 16 aa, BK virus
GSFFVCYYFPGFVACY

SEQ ID NO: 30968 - protein, 16 aa, BK virus
YTFYNLTGIAEKNRKI

SEQ ID NO: 30969 - protein, 16 aa, BK virus
TFYNLTGIAEKNRKIF

SEQ ID NO: 30970 - protein, 16 aa, BK virus
IFGGNYLDNCKCPYKL

SEQ ID NO: 30971 - protein, 16 aa, BK virus
FGGNYLDNCKCPYKLL

SEQ ID NO: 30972 - protein, 16 aa, BK virus
QYRRSYTKNGLKKSTK

SEQ ID NO: 30973 - protein, 16 aa, BK virus
YRRSYTKNGLKKSTKC

SEQ ID NO: 30974 - protein, 16 aa, BK virus
RRSYTKNGLKKSTKCT

SEQ ID NO: 30975 - protein, 16 aa, BK virus
RSYTKNGLKKSTKCTF

SEQ ID NO: 30976 - protein, 16 aa, BK virus
SYTKNGLKKSTKCTFR

SEQ ID NO: 30977 - protein, 16 aa, BK virus
YTKNGLKKSTKCTFRR

SEQ ID NO: 30978 - protein, 16 aa, BK virus
TKNGLKKSTKCTFRRV

SEQ ID NO: 30979 - protein, 16 aa, BK virus
KNGLKKSTKCTFRRVY

SEQ ID NO: 30980 - protein, 16 aa, BK virus
NGLKKSTKCTFRRVYR

SEQ ID NO: 30981 - protein, 16 aa, BK virus
GLKKSTKCTFRRVYRK

SEQ ID NO: 30982 - protein, 16 aa, BK virus
LKKSTKCTFRRVYRKN

SEQ ID NO: 30983 - protein, 16 aa, BK virus
KKSTKCTFRRVYRKNY

SEQ ID NO: 30984 - protein, 16 aa, BK virus
KSTKCTFRRVYRKNYC

SEQ ID NO: 30985 - protein, 16 aa, BK virus
STKCTFRRVYRKNYCP

SEQ ID NO: 30986 - protein, 16 aa, BK virus
TKCTFRRVYRKNYCPR

SEQ ID NO: 30987 - protein, 16 aa, BK virus
KCTFRRVYRKNYCPRR

SEQ ID NO: 30988 - protein, 16 aa, BK virus
CTFRRVYRKNYCPRRC

SEQ ID NO: 30989 - protein, 16 aa, BK virus
SKNCSSMDVAFTSRPV

SEQ ID NO: 30990 - protein, 16 aa, BK virus
KNCSSMDVAFTSRPVR

SEQ ID NO: 30991 - protein, 16 aa, BK virus
NCSSMDVAFTSRPVRD

SEQ ID NO: 30992 - protein, 16 aa, BK virus
CSSMDVAFTSRPVRDC

SEQ ID NO: 30993 - protein, 16 aa, BK virus
SSMDVAFTSRPVRDCN

SEQ ID NO: 30994 - protein, 16 aa, BK virus
SMDVAFTSRPVRDCNT

SEQ ID NO: 30995 - protein, 16 aa, BK virus
MDVAFTSRPVRDCNTC

SEQ ID NO: 30996 - protein, 16 aa, BK virus
DVAFTSRPVRDCNTCS

SEQ ID NO: 30997 - protein, 16 aa, BK virus
RWPQPKEKESVQGQLP

SEQ ID NO: 30998 - protein, 16 aa, BK virus
WPQPKEKESVQGQLPK

SEQ ID NO: 30999 - protein, 16 aa, BK virus
PQPKEKESVQGQLPKS

SEQ ID NO: 31000 - protein, 16 aa, BK virus
QPKEKESVQGQLPKSQ

SEQ ID NO: 31001 - protein, 16 aa, BK virus
PKEKESVQGQLPKSQR

SEQ ID NO: 31002 - protein, 16 aa, BK virus
KEKESVQGQLPKSQRN

SEQ ID NO: 31003 - protein, 16 aa, BK virus
EKESVQGQLPKSQRNP

SEQ ID NO: 31004 - protein, 16 aa, BK virus
KESVQGQLPKSQRNPC

SEQ ID NO: 31005 - protein, 16 aa, BK virus
ESVQGQLPKSQRNPCK

SEQ ID NO: 31006 - protein, 16 aa, BK virus
SVQGQLPKSQRNPCKC

SEQ ID NO: 31007 - protein, 16 aa, BK virus
VQGQLPKSQRNPCKCQ

SEQ ID NO: 31008 - protein, 16 aa, BK virus
QGQLPKSQRNPCKCQN

SEQ ID NO: 31009 - protein, 16 aa, BK virus
GQLPKSQRNPCKCQNY

SEQ ID NO: 31010 - protein, 16 aa, BK virus
VLKMTLAVIAQREKCF

SEQ ID NO: 31011 - protein, 16 aa, BK virus
LKMTLAVIAQREKCFP

SEQ ID NO: 31012 - protein, 16 aa, BK virus
KMTLAVIAQREKCFPV

SEQ ID NO: 31013 - protein, 16 aa, BK virus
MTLAVIAQREKCFPVT

SEQ ID NO: 31014 - protein, 16 aa, BK virus
TLAVIAQREKCFPVTA

SEQ ID NO: 31015 - protein, 16 aa, BK virus
LAVIAQREKCFPVTAQ

SEQ ID NO: 31016 - protein, 16 aa, BK virus
AVIAQREKCFPVTAQQ

SEQ ID NO: 31017 - protein, 16 aa, BK virus
VIAQREKCFPVTAQQE

SEQ ID NO: 31018 - protein, 16 aa, BK virus
IAQREKCFPVTAQQEF

SEQ ID NO: 31019 - protein, 16 aa, BK virus
AQREKCFPVTAQQEFP

SEQ ID NO: 31020 - protein, 16 aa, BK virus
QREKCFPVTAQQEFPS

SEQ ID NO: 31021 - protein, 16 aa, BK virus
REKCFPVTAQQEFPSP

SEQ ID NO: 31022 - protein, 16 aa, BK virus
EKCFPVTAQQEFPSPI

SEQ ID NO: 31023 - protein, 16 aa, BK virus
LACLTFMQGHKKCMSM

SEQ ID NO: 31024 - protein, 16 aa, BK virus
ACLTFMQGHKKCMSMV

SEQ ID NO: 31025 - protein, 16 aa, BK virus
CLTFMQGHKKCMSMVE

SEQ ID NO: 31026 - protein, 16 aa, BK virus
LTFMQGHKKCMSMVEE

SEQ ID NO: 31027 - protein, 16 aa, BK virus
TFMQGHKKCMSMVEEN

SEQ ID NO: 31028 - protein, 16 aa, BK virus
FMQGHKKCMSMVEENL

SEQ ID NO: 31029 - protein, 16 aa, BK virus
MQGHKKCMSMVEENLF

SEQ ID NO: 31030 - protein, 16 aa, BK virus
QGHKKCMSMVEENLFK

SEQ ID NO: 31031 - protein, 16 aa, BK virus
GHKKCMSMVEENLFKA

SEQ ID NO: 31032 - protein, 16 aa, BK virus
HKKCMSMVEENLFKAV

SEQ ID NO: 31033 - protein, 16 aa, BK virus
KKCMSMVEENLFKAVI

SEQ ID NO: 31034 - protein, 16 aa, BK virus
KCMSMVEENLFKAVIS

SEQ ID NO: 31035 - protein, 16 aa, BK virus
CMSMVEENLFKAVIST

SEQ ID NO: 31036 - protein, 16 aa, BK virus
MSMVEENLFKAVISTS

SEQ ID NO: 31037 - protein, 16 aa, BK virus
SMVEENLFKAVISTSL

SEQ ID NO: 31038 - protein, 16 aa, BK virus
MVEENLFKAVISTSLL

SEQ ID NO: 31039 - protein, 16 aa, BK virus
ILTIRPIWTKTMLIQL

SEQ ID NO: 31040 - protein, 16 aa, BK virus
LTIRPIWTKTMLIQLS

SEQ ID NO: 31041 - protein, 16 aa, BK virus
TIRPIWTKTMLIQLSA

SEQ ID NO: 31042 - protein, 16 aa, BK virus
IRPIWTKTMLIQLSAG

SEQ ID NO: 31043 - protein, 16 aa, BK virus
RPIWTKTMLIQLSAGY

SEQ ID NO: 31044 - protein, 16 aa, BK virus
PIWTKTMLIQLSAGYL

SEQ ID NO: 31045 - protein, 16 aa, BK virus
IWTKTMLIQLSAGYLI

SEQ ID NO: 31046 - protein, 16 aa, BK virus
WTKTMLIQLSAGYLIP

SEQ ID NO: 31047 - protein, 16 aa, BK virus
TKTMLIQLSAGYLIPV

SEQ ID NO: 31048 - protein, 16 aa, BK virus
KTMLIQLSAGYLIPVE

SEQ ID NO: 31049 - protein, 16 aa, BK virus
TMLIQLSAGYLIPVEM

SEQ ID NO: 31050 - protein, 16 aa, BK virus
MLIQLSAGYLIPVEMK

SEQ ID NO: 31051 - protein, 16 aa, BK virus
LIQLSAGYLIPVEMKM

SEQ ID NO: 31052 - protein, 16 aa, BK virus
IQLSAGYLIPVEMKML

SEQ ID NO: 31053 - protein, 16 aa, BK virus
QLSAGYLIPVEMKMLG

SEQ ID NO: 31054 - protein, 16 aa, BK virus
LSAGYLIPVEMKMLGI

SEQ ID NO: 31055 - protein, 16 aa, BK virus
SAGYLIPVEMKMLGIL

SEQ ID NO: 31056 - protein, 16 aa, BK virus
AGYLIPVEMKMLGILG

SEQ ID NO: 31057 - protein, 16 aa, BK virus
GYLIPVEMKMLGILGL

SEQ ID NO: 31058 - protein, 16 aa, BK virus
YLIPVEMKMLGILGLS

SEQ ID NO: 31059 - protein, 16 aa, BK virus
LIPVEMKMLGILGLSQ

SEQ ID NO: 31060 - protein, 16 aa, BK virus
IPVEMKMLGILGLSQE

SEQ ID NO: 31061 - protein, 16 aa, BK virus
PVEMKMLGILGLSQEG

SEQ ID NO: 31062 - protein, 16 aa, BK virus
VEMKMLGILGLSQEGK

SEQ ID NO: 31063 - protein, 16 aa, BK virus
EMKMLGILGLSQEGKM

SEQ ID NO: 31064 - protein, 16 aa, BK virus
MKMLGILGLSQEGKMF

SEQ ID NO: 31065 - protein, 16 aa, BK virus
KMLGILGLSQEGKMFP

SEQ ID NO: 31066 - protein, 16 aa, BK virus
MLGILGLSQEGKMFPQ

SEQ ID NO: 31067 - protein, 16 aa, BK virus
LGILGLSQEGKMFPQY

SEQ ID NO: 31068 - protein, 16 aa, BK virus
GILGLSQEGKMFPQYF

SEQ ID NO: 31069 - protein, 16 aa, BK virus
ILGLSQEGKMFPQYFM

SEQ ID NO: 31070 - protein, 16 aa, BK virus
MNRVWGLFVKLIACMF

SEQ ID NO: 31071 - protein, 16 aa, BK virus
NRVWGLFVKLIACMFQ

SEQ ID NO: 31072 - protein, 16 aa, BK virus
RVWGLFVKLIACMFQL

SEQ ID NO: 31073 - protein, 16 aa, BK virus
VWGLFVKLIACMFQLL

SEQ ID NO: 31074 - protein, 16 aa, BK virus
WGLFVKLIACMFQLLI

SEQ ID NO: 31075 - protein, 16 aa, BK virus
GLFVKLIACMFQLLIF

SEQ ID NO: 31076 - protein, 16 aa, BK virus
LFVKLIACMFQLLIFV

SEQ ID NO: 31077 - protein, 16 aa, BK virus
FVKLIACMFQLLIFVA

SEQ ID NO: 31078 - protein, 16 aa, BK virus
VKLIACMFQLLIFVAC

SEQ ID NO: 31079 - protein, 16 aa, BK virus
KLIACMFQLLIFVACL

SEQ ID NO: 31080 - protein, 16 aa, BK virus
LIACMFQLLIFVACLL

SEQ ID NO: 31081 - protein, 16 aa, BK virus
IACMFQLLIFVACLLT

SEQ ID NO: 31082 - protein, 16 aa, BK virus
ACMFQLLIFVACLLTA

SEQ ID NO: 31083 - protein, 16 aa, BK virus
CMFQLLIFVACLLTAL

SEQ ID NO: 31084 - protein, 16 aa, BK virus
MFQLLIFVACLLTALE

SEQ ID NO: 31085 - protein, 16 aa, BK virus
FQLLIFVACLLTALEH

SEQ ID NO: 31086 - protein, 16 aa, BK virus
QLLIFVACLLTALEHN

SEQ ID NO: 31087 - protein, 16 aa, BK virus
LLIFVACLLTALEHNS

SEQ ID NO: 31088 - protein, 16 aa, BK virus
LIFVACLLTALEHNSG

SEQ ID NO: 31089 - protein, 16 aa, BK virus
IFVACLLTALEHNSGE

SEQ ID NO: 31090 - protein, 16 aa, BK virus
FVACLLTALEHNSGEA

SEQ ID NO: 31091 - protein, 16 aa, BK virus
VACLLTALEHNSGEAL

SEQ ID NO: 31092 - protein, 16 aa, BK virus
ACLLTALEHNSGEALQ

SEQ ID NO: 31093 - protein, 16 aa, BK virus
CLLTALEHNSGEALQD

SEQ ID NO: 31094 - protein, 16 aa, BK virus
LLTALEHNSGEALQDI

SEQ ID NO: 31095 - protein, 16 aa, BK virus
LTALEHNSGEALQDIL

SEQ ID NO: 31096 - protein, 16 aa, BK virus
TALEHNSGEALQDILR

SEQ ID NO: 31097 - protein, 16 aa, BK virus
ALEHNSGEALQDILRS

SEQ ID NO: 31098 - protein, 16 aa, BK virus
LEHNSGEALQDILRSA

SEQ ID NO: 31099 - protein, 16 aa, BK virus
TGEPREWMGSLCMVWN

SEQ ID NO: 31100 - protein, 16 aa, BK virus
GEPREWMGSLCMVWNP

SEQ ID NO: 31101 - protein, 16 aa, BK virus
EPREWMGSLCMVWNPR

SEQ ID NO: 31102 - protein, 16 aa, BK virus
KRLGCLMAQKDFQGTQ

SEQ ID NO: 31103 - protein, 16 aa, BK virus
RLGCLMAQKDFQGTQI

SEQ ID NO: 31104 - protein, 16 aa, BK virus
DILTNRDNCKPKCFKQ

SEQ ID NO: 31105 - protein, 16 aa, BK virus
ILTNRDNCKPKCFKQV

SEQ ID NO: 31106 - protein, 16 aa, BK virus
LTNRDNCKPKCFKQVL

SEQ ID NO: 31107 - protein, 16 aa, BK virus
TNRDNCKPKCFKQVLL

SEQ ID NO: 31108 - protein, 16 aa, BK virus
NRDNCKPKCFKQVLLL

SEQ ID NO: 31109 - protein, 16 aa, BK virus
RDNCKPKCFKQVLLLY

SEQ ID NO: 31110 - protein, 16 aa, BK virus
DNCKPKCFKQVLLLYI

SEQ ID NO: 31111 - protein, 16 aa, BK virus
NCKPKCFKQVLLLYIY

SEQ ID NO: 31112 - protein, 16 aa, BK virus
CKPKCFKQVLLLYIYI

SEQ ID NO: 31113 - protein, 16 aa, BK virus
MLLLYKPLLSLCYFGG

SEQ ID NO: 31114 - protein, 16 aa, BK virus
LLLYKPLLSLCYFGGG

SEQ ID NO: 31115 - protein, 16 aa, BK virus
LLYKPLLSLCYFGGGV

SEQ ID NO: 31116 - protein, 16 aa, BK virus
LYKPLLSLCYFGGGVL

SEQ ID NO: 31117 - protein, 16 aa, BK virus
YKPLLSLCYFGGGVLG

SEQ ID NO: 31118 - protein, 16 aa, BK virus
KPLLSLCYFGGGVLGL

SEQ ID NO: 31119 - protein, 16 aa, BK virus
PLLSLCYFGGGVLGLL

SEQ ID NO: 31120 - protein, 16 aa, BK virus
LLSLCYFGGGVLGLLK

SEQ ID NO: 31121 - protein, 16 aa, BK virus
LSLCYFGGGVLGLLKH

SEQ ID NO: 31122 - protein, 16 aa, BK virus
LWGSDLWESSAGAEVS

SEQ ID NO: 31123 - protein, 16 aa, BK virus
WGSDLWESSAGAEVSE

SEQ ID NO: 31124 - protein, 16 aa, BK virus
GSDLWESSAGAEVSET

SEQ ID NO: 31125 - protein, 16 aa, BK virus
SDLWESSAGAEVSETW

SEQ ID NO: 31126 - protein, 16 aa, BK virus
DLWESSAGAEVSETWE

SEQ ID NO: 31127 - protein, 16 aa, BK virus
LWESSAGAEVSETWEE

SEQ ID NO: 31128 - protein, 16 aa, BK virus
WESSAGAEVSETWEEH

SEQ ID NO: 31129 - protein, 16 aa, BK virus
ESSAGAEVSETWEEHC

SEQ ID NO: 31130 - protein, 16 aa, BK virus
SSAGAEVSETWEEHCD

SEQ ID NO: 31131 - protein, 16 aa, BK virus
SAGAEVSETWEEHCDW

SEQ ID NO: 31132 - protein, 16 aa, BK virus
AGAEVSETWEEHCDWD

SEQ ID NO: 31133 - protein, 16 aa, BK virus
GAEVSETWEEHCDWDS

SEQ ID NO: 31134 - protein, 16 aa, BK virus
AEVSETWEEHCDWDSV

SEQ ID NO: 31135 - protein, 16 aa, BK virus
EVSETWEEHCDWDSVL

SEQ ID NO: 31136 - protein, 16 aa, BK virus
VSETWEEHCDWDSVLD

SEQ ID NO: 31137 - protein, 16 aa, BK virus
SETWEEHCDWDSVLDP

SEQ ID NO: 31138 - protein, 16 aa, BK virus
ETWEEHCDWDSVLDPC

SEQ ID NO: 31139 - protein, 16 aa, BK virus
TWEEHCDWDSVLDPCP

SEQ ID NO: 31140 - protein, 16 aa, BK virus
WEEHCDWDSVLDPCPE

SEQ ID NO: 31141 - protein, 16 aa, BK virus
EEHCDWDSVLDPCPES

SEQ ID NO: 31142 - protein, 16 aa, BK virus
EHCDWDSVLDPCPESS

SEQ ID NO: 31143 - protein, 16 aa, BK virus
HCDWDSVLDPCPESSV

SEQ ID NO: 31144 - protein, 16 aa, BK virus
CDWDSVLDPCPESSVS

SEQ ID NO: 31145 - protein, 16 aa, BK virus
DWDSVLDPCPESSVSE

SEQ ID NO: 31146 - protein, 16 aa, BK virus
WDSVLDPCPESSVSES

SEQ ID NO: 31147 - protein, 16 aa, BK virus
DSVLDPCPESSVSESS

SEQ ID NO: 31148 - protein, 16 aa, BK virus
SVLDPCPESSVSESSS

SEQ ID NO: 31149 - protein, 16 aa, BK virus
VLDPCPESSVSESSSL

SEQ ID NO: 31150 - protein, 16 aa, BK virus
LDPCPESSVSESSSLV

SEQ ID NO: 31151 - protein, 16 aa, BK virus
DPCPESSVSESSSLVI

SEQ ID NO: 31152 - protein, 16 aa, BK virus
PCPESSVSESSSLVIS

SEQ ID NO: 31153 - protein, 16 aa, BK virus
CPESSVSESSSLVISR

SEQ ID NO: 31154 - protein, 16 aa, BK virus
PESSVSESSSLVISRI

SEQ ID NO: 31155 - protein, 16 aa, BK virus
ESSVSESSSLVISRIH

SEQ ID NO: 31156 - protein, 16 aa, BK virus
SSVSESSSLVISRIHF

SEQ ID NO: 31157 - protein, 16 aa, BK virus
SVSESSSLVISRIHFP

SEQ ID NO: 31158 - protein, 16 aa, BK virus
VSESSSLVISRIHFPM

SEQ ID NO: 31159 - protein, 16 aa, BK virus
SESSSLVISRIHFPMH

SEQ ID NO: 31160 - protein, 16 aa, BK virus
ESSSLVISRIHFPMHI

SEQ ID NO: 31161 - protein, 16 aa, BK virus
SSSLVISRIHFPMHIL

SEQ ID NO: 31162 - protein, 16 aa, BK virus
SSLVISRIHFPMHILY

SEQ ID NO: 31163 - protein, 16 aa, BK virus
SLVISRIHFPMHILYF

SEQ ID NO: 31164 - protein, 16 aa, BK virus
LVISRIHFPMHILYFI

SEQ ID NO: 31165 - protein, 16 aa, BK virus
VISRIHFPMHILYFIL

SEQ ID NO: 31166 - protein, 16 aa, BK virus
ISRIHFPMHILYFILE

SEQ ID NO: 31167 - protein, 16 aa, BK virus
SRIHFPMHILYFILEK

SEQ ID NO: 31168 - protein, 16 aa, BK virus
RIHFPMHILYFILEKV

SEQ ID NO: 31169 - protein, 16 aa, BK virus
IHFPMHILYFILEKVY

SEQ ID NO: 31170 - protein, 16 aa, BK virus
HFPMHILYFILEKVYI

SEQ ID NO: 31171 - protein, 16 aa, BK virus
FPMHILYFILEKVYIL

SEQ ID NO: 31172 - protein, 16 aa, BK virus
PMHILYFILEKVYILI

SEQ ID NO: 31173 - protein, 16 aa, BK virus
MHILYFILEKVYILIS

SEQ ID NO: 31174 - protein, 16 aa, BK virus
HILYFILEKVYILISE

SEQ ID NO: 31175 - protein, 16 aa, BK virus
ILYFILEKVYILISES

SEQ ID NO: 31176 - protein, 16 aa, BK virus
LYFILEKVYILISESS

SEQ ID NO: 31177 - protein, 16 aa, BK virus
YFILEKVYILISESSL

SEQ ID NO: 31178 - protein, 16 aa, BK virus
FILEKVYILISESSLS

SEQ ID NO: 31179 - protein, 16 aa, BK virus
ILEKVYILISESSLSF

SEQ ID NO: 31180 - protein, 16 aa, BK virus
LEKVYILISESSLSFH

SEQ ID NO: 31181 - protein, 16 aa, BK virus
EKVYILISESSLSFHS

SEQ ID NO: 31182 - protein, 16 aa, BK virus
KVYILISESSLSFHST

SEQ ID NO: 31183 - protein, 16 aa, BK virus
VYILISESSLSFHSTI

SEQ ID NO: 31184 - protein, 16 aa, BK virus
YILISESSLSFHSTIL

SEQ ID NO: 31185 - protein, 16 aa, BK virus
ILISESSLSFHSTILD

SEQ ID NO: 31186 - protein, 16 aa, BK virus
LISESSLSFHSTILDC

SEQ ID NO: 31187 - protein, 16 aa, BK virus
ISESSLSFHSTILDCI

SEQ ID NO: 31188 - protein, 16 aa, BK virus
SESSLSFHSTILDCIS

SEQ ID NO: 31189 - protein, 16 aa, BK virus
ESSLSFHSTILDCISV

SEQ ID NO: 31190 - protein, 16 aa, BK virus
SSLSFHSTILDCISVA

SEQ ID NO: 31191 - protein, 16 aa, BK virus
SLSFHSTILDCISVAK

SEQ ID NO: 31192 - protein, 16 aa, BK virus
LSFHSTILDCISVAKS

SEQ ID NO: 31193 - protein, 16 aa, BK virus
SFHSTILDCISVAKSA

SEQ ID NO: 31194 - protein, 16 aa, BK virus
FHSTILDCISVAKSAT

SEQ ID NO: 31195 - protein, 16 aa, BK virus
HSTILDCISVAKSATG

SEQ ID NO: 31196 - protein, 16 aa, BK virus
STILDCISVAKSATGL

SEQ ID NO: 31197 - protein, 16 aa, BK virus
TILDCISVAKSATGLN

SEQ ID NO: 31198 - protein, 16 aa, BK virus
ILDCISVAKSATGLNQ

SEQ ID NO: 31199 - protein, 16 aa, BK virus
LDCISVAKSATGLNQI

SEQ ID NO: 31200 - protein, 16 aa, BK virus
DCISVAKSATGLNQIS

SEQ ID NO: 31201 - protein, 16 aa, BK virus
CISVAKSATGLNQISS

SEQ ID NO: 31202 - protein, 16 aa, BK virus
ISVAKSATGLNQISSS

SEQ ID NO: 31203 - protein, 16 aa, BK virus
SVAKSATGLNQISSSN

SEQ ID NO: 31204 - protein, 16 aa, BK virus
VAKSATGLNQISSSNK

SEQ ID NO: 31205 - protein, 16 aa, BK virus
AKSATGLNQISSSNKV

SEQ ID NO: 31206 - protein, 16 aa, BK virus
KSATGLNQISSSNKVI

SEQ ID NO: 31207 - protein, 16 aa, BK virus
SATGLNQISSSNKVIP

SEQ ID NO: 31208 - protein, 16 aa, BK virus
ATGLNQISSSNKVIPL

SEQ ID NO: 31209 - protein, 16 aa, BK virus
TGLNQISSSNKVIPLC

SEQ ID NO: 31210 - protein, 16 aa, BK virus
GLNQISSSNKVIPLCK

SEQ ID NO: 31211 - protein, 16 aa, BK virus
LNQISSSNKVIPLCKI

SEQ ID NO: 31212 - protein, 16 aa, BK virus
NQISSSNKVIPLCKIL

SEQ ID NO: 31213 - protein, 16 aa, BK virus
QISSSNKVIPLCKILF

SEQ ID NO: 31214 - protein, 16 aa, BK virus
ISSSNKVIPLCKILFS

SEQ ID NO: 31215 - protein, 16 aa, BK virus
SSSNKVIPLCKILFSS

SEQ ID NO: 31216 - protein, 16 aa, BK virus
SSNKVIPLCKILFSSK

SEQ ID NO: 31217 - protein, 16 aa, BK virus
SNKVIPLCKILFSSKN

SEQ ID NO: 31218 - protein, 16 aa, BK virus
NKVIPLCKILFSSKNS

SEQ ID NO: 31219 - protein, 16 aa, BK virus
KVIPLCKILFSSKNSE

SEQ ID NO: 31220 - protein, 16 aa, BK virus
VIPLCKILFSSKNSEF

SEQ ID NO: 31221 - protein, 16 aa, BK virus
IPLCKILFSSKNSEFC

SEQ ID NO: 31222 - protein, 16 aa, BK virus
PLCKILFSSKNSEFCK

SEQ ID NO: 31223 - protein, 16 aa, BK virus
LCKILFSSKNSEFCKD

SEQ ID NO: 31224 - protein, 16 aa, BK virus
CKILFSSKNSEFCKDF

SEQ ID NO: 31225 - protein, 16 aa, BK virus
KILFSSKNSEFCKDFL

SEQ ID NO: 31226 - protein, 16 aa, BK virus
ILFSSKNSEFCKDFLK

SEQ ID NO: 31227 - protein, 16 aa, BK virus
LFSSKNSEFCKDFLKY

SEQ ID NO: 31228 - protein, 16 aa, BK virus
FSSKNSEFCKDFLKYI

SEQ ID NO: 31229 - protein, 16 aa, BK virus
SSKNSEFCKDFLKYIL

SEQ ID NO: 31230 - protein, 16 aa, BK virus
SKNSEFCKDFLKYILG

SEQ ID NO: 31231 - protein, 16 aa, BK virus
KNSEFCKDFLKYILGL

SEQ ID NO: 31232 - protein, 16 aa, BK virus
NSEFCKDFLKYILGLK

SEQ ID NO: 31233 - protein, 16 aa, BK virus
SEFCKDFLKYILGLKS

SEQ ID NO: 31234 - protein, 16 aa, BK virus
EFCKDFLKYILGLKSI

SEQ ID NO: 31235 - protein, 16 aa, BK virus
FCKDFLKYILGLKSIC

SEQ ID NO: 31236 - protein, 16 aa, BK virus
CKDFLKYILGLKSICL

SEQ ID NO: 31237 - protein, 16 aa, BK virus
KDFLKYILGLKSICLT

SEQ ID NO: 31238 - protein, 16 aa, BK virus
DFLKYILGLKSICLTN

SEQ ID NO: 31239 - protein, 16 aa, BK virus
FLKYILGLKSICLTNL

SEQ ID NO: 31240 - protein, 16 aa, BK virus
LKYILGLKSICLTNLA

SEQ ID NO: 31241 - protein, 16 aa, BK virus
KYILGLKSICLTNLAC

SEQ ID NO: 31242 - protein, 16 aa, BK virus
YILGLKSICLTNLACR

SEQ ID NO: 31243 - protein, 16 aa, BK virus
ILGLKSICLTNLACRV

SEQ ID NO: 31244 - protein, 16 aa, BK virus
LGLKSICLTNLACRVL

SEQ ID NO: 31245 - protein, 16 aa, BK virus
GLKSICLTNLACRVLG

SEQ ID NO: 31246 - protein, 16 aa, BK virus
LKSICLTNLACRVLGT

SEQ ID NO: 31247 - protein, 16 aa, BK virus
KSICLTNLACRVLGTG

SEQ ID NO: 31248 - protein, 16 aa, BK virus
SICLTNLACRVLGTGY

SEQ ID NO: 31249 - protein, 16 aa, BK virus
ICLTNLACRVLGTGYS

SEQ ID NO: 31250 - protein, 16 aa, BK virus
CLTNLACRVLGTGYSF

SEQ ID NO: 31251 - protein, 16 aa, BK virus
LTNLACRVLGTGYSFI

SEQ ID NO: 31252 - protein, 16 aa, BK virus
TNLACRVLGTGYSFIV

SEQ ID NO: 31253 - protein, 16 aa, BK virus
NLACRVLGTGYSFIVT

SEQ ID NO: 31254 - protein, 16 aa, BK virus
LACRVLGTGYSFIVTK

SEQ ID NO: 31255 - protein, 16 aa, BK virus
ACRVLGTGYSFIVTKP

SEQ ID NO: 31256 - protein, 16 aa, BK virus
CRVLGTGYSFIVTKPG

SEQ ID NO: 31257 - protein, 16 aa, BK virus
RVLGTGYSFIVTKPGG

SEQ ID NO: 31258 - protein, 16 aa, BK virus
VLGTGYSFIVTKPGGN

SEQ ID NO: 31259 - protein, 16 aa, BK virus
LGTGYSFIVTKPGGNI

SEQ ID NO: 31260 - protein, 16 aa, BK virus
GTGYSFIVTKPGGNIW

SEQ ID NO: 31261 - protein, 16 aa, BK virus
TGYSFIVTKPGGNIWV

SEQ ID NO: 31262 - protein, 16 aa, BK virus
GYSFIVTKPGGNIWVL

SEQ ID NO: 31263 - protein, 16 aa, BK virus
YSFIVTKPGGNIWVLL

SEQ ID NO: 31264 - protein, 16 aa, BK virus
SFIVTKPGGNIWVLLF

SEQ ID NO: 31265 - protein, 16 aa, BK virus
FIVTKPGGNIWVLLFK

SEQ ID NO: 31266 - protein, 16 aa, BK virus
IVTKPGGNIWVLLFKC

SEQ ID NO: 31267 - protein, 16 aa, BK virus
VTKPGGNIWVLLFKCF

SEQ ID NO: 31268 - protein, 16 aa, BK virus
TKPGGNIWVLLFKCFF

SEQ ID NO: 31269 - protein, 16 aa, BK virus
KPGGNIWVLLFKCFFS

SEQ ID NO: 31270 - protein, 16 aa, BK virus
PGGNIWVLLFKCFFSK

SEQ ID NO: 31271 - protein, 16 aa, BK virus
GGNIWVLLFKCFFSKF

SEQ ID NO: 31272 - protein, 16 aa, BK virus
GNIWVLLFKCFFSKFT

SEQ ID NO: 31273 - protein, 16 aa, BK virus
NIWVLLFKCFFSKFTL

SEQ ID NO: 31274 - protein, 16 aa, BK virus
IWVLLFKCFFSKFTLT

SEQ ID NO: 31275 - protein, 16 aa, BK virus
WVLLFKCFFSKFTLTL

SEQ ID NO: 31276 - protein, 16 aa, BK virus
VLLFKCFFSKFTLTLP

SEQ ID NO: 31277 - protein, 16 aa, BK virus
LLFKCFFSKFTLTLPS

SEQ ID NO: 31278 - protein, 16 aa, BK virus
LFKCFFSKFTLTLPSK

SEQ ID NO: 31279 - protein, 16 aa, BK virus
SLKLSKLFIPCPEGKS

SEQ ID NO: 31280 - protein, 16 aa, BK virus
LKLSKLFIPCPEGKSF

SEQ ID NO: 31281 - protein, 16 aa, BK virus
KLSKLFIPCPEGKSFD

SEQ ID NO: 31282 - protein, 16 aa, BK virus
LSKLFIPCPEGKSFDS

SEQ ID NO: 31283 - protein, 16 aa, BK virus
SKLFIPCPEGKSFDSA

SEQ ID NO: 31284 - protein, 16 aa, BK virus
KLFIPCPEGKSFDSAP

SEQ ID NO: 31285 - protein, 16 aa, BK virus
LFIPCPEGKSFDSAPV

SEQ ID NO: 31286 - protein, 16 aa, BK virus
FIPCPEGKSFDSAPVP

SEQ ID NO: 31287 - protein, 16 aa, BK virus
IPCPEGKSFDSAPVPF

SEQ ID NO: 31288 - protein, 16 aa, BK virus
PCPEGKSFDSAPVPFT

SEQ ID NO: 31289 - protein, 16 aa, BK virus
CPEGKSFDSAPVPFTS

SEQ ID NO: 31290 - protein, 16 aa, BK virus
PEGKSFDSAPVPFTSS

SEQ ID NO: 31291 - protein, 16 aa, BK virus
EGKSFDSAPVPFTSSK

SEQ ID NO: 31292 - protein, 16 aa, BK virus
GKSFDSAPVPFTSSKT

SEQ ID NO: 31293 - protein, 16 aa, BK virus
KSFDSAPVPFTSSKTT

SEQ ID NO: 31294 - protein, 16 aa, BK virus
SFDSAPVPFTSSKTTM

SEQ ID NO: 31295 - protein, 16 aa, BK virus
FDSAPVPFTSSKTTMY

SEQ ID NO: 31296 - protein, 16 aa, BK virus
SIATPSSKVSLSMGRF

SEQ ID NO: 31297 - protein, 16 aa, BK virus
IATPSSKVSLSMGRFT

SEQ ID NO: 31298 - protein, 16 aa, BK virus
ATPSSKVSLSMGRFTF

SEQ ID NO: 31299 - protein, 16 aa, BK virus
TPSSKVSLSMGRFTFK

SEQ ID NO: 31300 - protein, 16 aa, BK virus
PSSKVSLSMGRFTFKA

SEQ ID NO: 31301 - protein, 16 aa, BK virus
SSKVSLSMGRFTFKAL

SEQ ID NO: 31302 - protein, 16 aa, BK virus
SKVSLSMGRFTFKALP

SEQ ID NO: 31303 - protein, 16 aa, BK virus
KVSLSMGRFTFKALPP

SEQ ID NO: 31304 - protein, 16 aa, BK virus
VSLSMGRFTFKALPPH

SEQ ID NO: 31305 - protein, 16 aa, BK virus
SLSMGRFTFKALPPHK

SEQ ID NO: 31306 - protein, 16 aa, BK virus
LSMGRFTFKALPPHKS

SEQ ID NO: 31307 - protein, 16 aa, BK virus
SMGRFTFKALPPHKSN

SEQ ID NO: 31308 - protein, 16 aa, BK virus
MGRFTFKALPPHKSNN

SEQ ID NO: 31309 - protein, 16 aa, BK virus
GRFTFKALPPHKSNNP

SEQ ID NO: 31310 - protein, 16 aa, BK virus
RFTFKALPPHKSNNPA

SEQ ID NO: 31311 - protein, 16 aa, BK virus
FTFKALPPHKSNNPAA

SEQ ID NO: 31312 - protein, 16 aa, BK virus
TFKALPPHKSNNPAAS

SEQ ID NO: 31313 - protein, 16 aa, BK virus
FKALPPHKSNNPAASV

SEQ ID NO: 31314 - protein, 16 aa, BK virus
KALPPHKSNNPAASVV

SEQ ID NO: 31315 - protein, 16 aa, BK virus
ALPPHKSNNPAASVVF

SEQ ID NO: 31316 - protein, 16 aa, BK virus
LPPHKSNNPAASVVFP

SEQ ID NO: 31317 - protein, 16 aa, BK virus
PPHKSNNPAASVVFPL

SEQ ID NO: 31318 - protein, 16 aa, BK virus
PHKSNNPAASVVFPLS

SEQ ID NO: 31319 - protein, 16 aa, BK virus
HKSNNPAASVVFPLSM

SEQ ID NO: 31320 - protein, 16 aa, BK virus
KSNNPAASVVFPLSMG

SEQ ID NO: 31321 - protein, 16 aa, BK virus
SNNPAASVVFPLSMGP

SEQ ID NO: 31322 - protein, 16 aa, BK virus
NNPAASVVFPLSMGPL

SEQ ID NO: 31323 - protein, 16 aa, BK virus
NPAASVVFPLSMGPLN

SEQ ID NO: 31324 - protein, 16 aa, BK virus
PAASVVFPLSMGPLNN

SEQ ID NO: 31325 - protein, 16 aa, BK virus
AASVVFPLSMGPLNNQ

SEQ ID NO: 31326 - protein, 16 aa, BK virus
ASVVFPLSMGPLNNQY

SEQ ID NO: 31327 - protein, 16 aa, BK virus
SVVFPLSMGPLNNQYL

SEQ ID NO: 31328 - protein, 16 aa, BK virus
VVFPLSMGPLNNQYLL

SEQ ID NO: 31329 - protein, 16 aa, BK virus
VFPLSMGPLNNQYLLL

SEQ ID NO: 31330 - protein, 16 aa, BK virus
FPLSMGPLNNQYLLLG

SEQ ID NO: 31331 - protein, 16 aa, BK virus
PLSMGPLNNQYLLLGT

SEQ ID NO: 31332 - protein, 16 aa, BK virus
LSMGPLNNQYLLLGTL

SEQ ID NO: 31333 - protein, 16 aa, BK virus
SMGPLNNQYLLLGTLK

SEQ ID NO: 31334 - protein, 16 aa, BK virus
MGPLNNQYLLLGTLKT

SEQ ID NO: 31335 - protein, 16 aa, BK virus
GPLNNQYLLLGTLKTI

SEQ ID NO: 31336 - protein, 16 aa, BK virus
PLNNQYLLLGTLKTIQ

SEQ ID NO: 31337 - protein, 16 aa, BK virus
LNNQYLLLGTLKTIQC

SEQ ID NO: 31338 - protein, 16 aa, BK virus
NNQYLLLGTLKTIQCK

SEQ ID NO: 31339 - protein, 16 aa, BK virus
NQYLLLGTLKTIQCKK

SEQ ID NO: 31340 - protein, 16 aa, BK virus
QYLLLGTLKTIQCKKS

SEQ ID NO: 31341 - protein, 16 aa, BK virus
YLLLGTLKTIQCKKSN

SEQ ID NO: 31342 - protein, 16 aa, BK virus
LLLGTLKTIQCKKSNI

SEQ ID NO: 31343 - protein, 16 aa, BK virus
LLGTLKTIQCKKSNIT

SEQ ID NO: 31344 - protein, 16 aa, BK virus
LGTLKTIQCKKSNITE

SEQ ID NO: 31345 - protein, 16 aa, BK virus
GTLKTIQCKKSNITES

SEQ ID NO: 31346 - protein, 16 aa, BK virus
TLKTIQCKKSNITESI

SEQ ID NO: 31347 - protein, 16 aa, BK virus
LKTIQCKKSNITESIL

SEQ ID NO: 31348 - protein, 16 aa, BK virus
KTIQCKKSNITESILG

SEQ ID NO: 31349 - protein, 16 aa, BK virus
TIQCKKSNITESILGS

SEQ ID NO: 31350 - protein, 16 aa, BK virus
IQCKKSNITESILGSK

SEQ ID NO: 31351 - protein, 16 aa, BK virus
QCKKSNITESILGSKQ

SEQ ID NO: 31352 - protein, 16 aa, BK virus
CKKSNITESILGSKQC

SEQ ID NO: 31353 - protein, 16 aa, BK virus
KKSNITESILGSKQCS

SEQ ID NO: 31354 - protein, 16 aa, BK virus
KSNITESILGSKQCSQ

SEQ ID NO: 31355 - protein, 16 aa, BK virus
SNITESILGSKQCSQA

SEQ ID NO: 31356 - protein, 16 aa, BK virus
NITESILGSKQCSQAT

SEQ ID NO: 31357 - protein, 16 aa, BK virus
ITESILGSKQCSQATP

SEQ ID NO: 31358 - protein, 16 aa, BK virus
TESILGSKQCSQATPA

SEQ ID NO: 31359 - protein, 16 aa, BK virus
ESILGSKQCSQATPAI

SEQ ID NO: 31360 - protein, 16 aa, BK virus
SILGSKQCSQATPAIY

SEQ ID NO: 31361 - protein, 16 aa, BK virus
ILGSKQCSQATPAIYC

SEQ ID NO: 31362 - protein, 16 aa, BK virus
LGSKQCSQATPAIYCS

SEQ ID NO: 31363 - protein, 16 aa, BK virus
GSKQCSQATPAIYCSS

SEQ ID NO: 31364 - protein, 16 aa, BK virus
SKQCSQATPAIYCSST

SEQ ID NO: 31365 - protein, 16 aa, BK virus
KQCSQATPAIYCSSTA

SEQ ID NO: 31366 - protein, 16 aa, BK virus
QCSQATPAIYCSSTAF

SEQ ID NO: 31367 - protein, 16 aa, BK virus
CSQATPAIYCSSTAFP

SEQ ID NO: 31368 - protein, 16 aa, BK virus
NSKYIPNNKNTSSHFV

SEQ ID NO: 31369 - protein, 16 aa, BK virus
SKYIPNNKNTSSHFVS

SEQ ID NO: 31370 - protein, 16 aa, BK virus
KYIPNNKNTSSHFVST

SEQ ID NO: 31371 - protein, 16 aa, BK virus
YIPNNKNTSSHFVSTA

SEQ ID NO: 31372 - protein, 16 aa, BK virus
IPNNKNTSSHFVSTAY

SEQ ID NO: 31373 - protein, 16 aa, BK virus
PNNKNTSSHFVSTAYS

SEQ ID NO: 31374 - protein, 16 aa, BK virus
NNKNTSSHFVSTAYSV

SEQ ID NO: 31375 - protein, 16 aa, BK virus
NKNTSSHFVSTAYSVI

SEQ ID NO: 31376 - protein, 16 aa, BK virus
KNTSSHFVSTAYSVIN

SEQ ID NO: 31377 - protein, 16 aa, BK virus
NTSSHFVSTAYSVINF

SEQ ID NO: 31378 - protein, 16 aa, BK virus
TSSHFVSTAYSVINFQ

SEQ ID NO: 31379 - protein, 16 aa, BK virus
SSHFVSTAYSVINFQD

SEQ ID NO: 31380 - protein, 16 aa, BK virus
SHFVSTAYSVINFQDT

SEQ ID NO: 31381 - protein, 16 aa, BK virus
HFVSTAYSVINFQDTC

SEQ ID NO: 31382 - protein, 16 aa, BK virus
FVSTAYSVINFQDTCF

SEQ ID NO: 31383 - protein, 16 aa, BK virus
VSTAYSVINFQDTCFV

SEQ ID NO: 31384 - protein, 16 aa, BK virus
STAYSVINFQDTCFVS

SEQ ID NO: 31385 - protein, 16 aa, BK virus
TAYSVINFQDTCFVSS

SEQ ID NO: 31386 - protein, 16 aa, BK virus
AYSVINFQDTCFVSSG

SEQ ID NO: 31387 - protein, 16 aa, BK virus
YSVINFQDTCFVSSGS

SEQ ID NO: 31388 - protein, 16 aa, BK virus
SVINFQDTCFVSSGSS

SEQ ID NO: 31389 - protein, 16 aa, BK virus
VINFQDTCFVSSGSSG

SEQ ID NO: 31390 - protein, 16 aa, BK virus
INFQDTCFVSSGSSGL

SEQ ID NO: 31391 - protein, 16 aa, BK virus
NFQDTCFVSSGSSGLK

SEQ ID NO: 31392 - protein, 16 aa, BK virus
FQDTCFVSSGSSGLKS

SEQ ID NO: 31393 - protein, 16 aa, BK virus
QDTCFVSSGSSGLKSC

SEQ ID NO: 31394 - protein, 16 aa, BK virus
DTCFVSSGSSGLKSCS

SEQ ID NO: 31395 - protein, 16 aa, BK virus
TCFVSSGSSGLKSCSF

SEQ ID NO: 31396 - protein, 16 aa, BK virus
CFVSSGSSGLKSCSFK

SEQ ID NO: 31397 - protein, 16 aa, BK virus
FVSSGSSGLKSCSFKP

SEQ ID NO: 31398 - protein, 16 aa, BK virus
VSSGSSGLKSCSFKPP

SEQ ID NO: 31399 - protein, 16 aa, BK virus
MLSSIVWYGSLVKALY

SEQ ID NO: 31400 - protein, 16 aa, BK virus
LSSIVWYGSLVKALYS

SEQ ID NO: 31401 - protein, 16 aa, BK virus
SSIVWYGSLVKALYSK

SEQ ID NO: 31402 - protein, 16 aa, BK virus
SIVWYGSLVKALYSKY

SEQ ID NO: 31403 - protein, 16 aa, BK virus
IVWYGSLVKALYSKYS

SEQ ID NO: 31404 - protein, 16 aa, BK virus
VWYGSLVKALYSKYSL

SEQ ID NO: 31405 - protein, 16 aa, BK virus
WYGSLVKALYSKYSLL

SEQ ID NO: 31406 - protein, 16 aa, BK virus
YGSLVKALYSKYSLLT

SEQ ID NO: 31407 - protein, 16 aa, BK virus
GSLVKALYSKYSLLTP

SEQ ID NO: 31408 - protein, 16 aa, BK virus
SLVKALYSKYSLLTPL

SEQ ID NO: 31409 - protein, 16 aa, BK virus
LVKALYSKYSLLTPLQ

SEQ ID NO: 31410 - protein, 16 aa, BK virus
VKALYSKYSLLTPLQI

SEQ ID NO: 31411 - protein, 16 aa, BK virus
KALYSKYSLLTPLQIK

SEQ ID NO: 31412 - protein, 16 aa, BK virus
ALYSKYSLLTPLQIKK

SEQ ID NO: 31413 - protein, 16 aa, BK virus
LYSKYSLLTPLQIKKL

SEQ ID NO: 31414 - protein, 16 aa, BK virus
YSKYSLLTPLQIKKLK

SEQ ID NO: 31415 - protein, 16 aa, BK virus
SKYSLLTPLQIKKLKV

SEQ ID NO: 31416 - protein, 16 aa, BK virus
KYSLLTPLQIKKLKVH

SEQ ID NO: 31417 - protein, 16 aa, BK virus
YSLLTPLQIKKLKVHS

SEQ ID NO: 31418 - protein, 16 aa, BK virus
SLLTPLQIKKLKVHSF

SEQ ID NO: 31419 - protein, 16 aa, BK virus
QKLLIAETLCLCGVKK

SEQ ID NO: 31420 - protein, 16 aa, BK virus
KLLIAETLCLCGVKKN

SEQ ID NO: 31421 - protein, 16 aa, BK virus
LLIAETLCLCGVKKNI

SEQ ID NO: 31422 - protein, 16 aa, BK virus
LIAETLCLCGVKKNII

SEQ ID NO: 31423 - protein, 16 aa, BK virus
IAETLCLCGVKKNIIL

SEQ ID NO: 31424 - protein, 16 aa, BK virus
AETLCLCGVKKNIILC

SEQ ID NO: 31425 - protein, 16 aa, BK virus
ETLCLCGVKKNIILCP

SEQ ID NO: 31426 - protein, 16 aa, BK virus
TLCLCGVKKNIILCPA

SEQ ID NO: 31427 - protein, 16 aa, BK virus
LCLCGVKKNIILCPAH

SEQ ID NO: 31428 - protein, 16 aa, BK virus
CLCGVKKNIILCPAHM

SEQ ID NO: 31429 - protein, 16 aa, BK virus
LCGVKKNIILCPAHMC

SEQ ID NO: 31430 - protein, 16 aa, BK virus
CGVKKNIILCPAHMCL

SEQ ID NO: 31431 - protein, 16 aa, BK virus
GVKKNIILCPAHMCLL

SEQ ID NO: 31432 - protein, 16 aa, BK virus
VKKNIILCPAHMCLLI

SEQ ID NO: 31433 - protein, 16 aa, BK virus
KKNIILCPAHMCLLIK

SEQ ID NO: 31434 - protein, 16 aa, BK virus
KNIILCPAHMCLLIKV

SEQ ID NO: 31435 - protein, 16 aa, BK virus
NIILCPAHMCLLIKVT

SEQ ID NO: 31436 - protein, 16 aa, BK virus
IILCPAHMCLLIKVTE

SEQ ID NO: 31437 - protein, 16 aa, BK virus
ILCPAHMCLLIKVTEY

SEQ ID NO: 31438 - protein, 16 aa, BK virus
LCPAHMCLLIKVTEYF

SEQ ID NO: 31439 - protein, 16 aa, BK virus
CPAHMCLLIKVTEYFS

SEQ ID NO: 31440 - protein, 16 aa, BK virus
PAHMCLLIKVTEYFSI

SEQ ID NO: 31441 - protein, 16 aa, BK virus
AHMCLLIKVTEYFSIS

SEQ ID NO: 31442 - protein, 16 aa, BK virus
HMCLLIKVTEYFSISF

SEQ ID NO: 31443 - protein, 16 aa, BK virus
MCLLIKVTEYFSISFL

SEQ ID NO: 31444 - protein, 16 aa, BK virus
CLLIKVTEYFSISFLY

SEQ ID NO: 31445 - protein, 16 aa, BK virus
LLIKVTEYFSISFLYR

SEQ ID NO: 31446 - protein, 16 aa, BK virus
LIKVTEYFSISFLYRI

SEQ ID NO: 31447 - protein, 16 aa, BK virus
AFSLVVYTAKQARVLL

SEQ ID NO: 31448 - protein, 16 aa, BK virus
FSLVVYTAKQARVLLL

SEQ ID NO: 31449 - protein, 16 aa, BK virus
SLVVYTAKQARVLLLN

SEQ ID NO: 31450 - protein, 16 aa, BK virus
LVVYTAKQARVLLLNT

SEQ ID NO: 31451 - protein, 16 aa, BK virus
VVYTAKQARVLLLNTA

SEQ ID NO: 31452 - protein, 16 aa, BK virus
LRNWCRSEGKSLGSST

SEQ ID NO: 31453 - protein, 16 aa, BK virus
RNWCRSEGKSLGSSTF

SEQ ID NO: 31454 - protein, 16 aa, BK virus
NWCRSEGKSLGSSTFL

SEQ ID NO: 31455 - protein, 16 aa, BK virus
WCRSEGKSLGSSTFLF

SEQ ID NO: 31456 - protein, 16 aa, BK virus
CRSEGKSLGSSTFLFF

SEQ ID NO: 31457 - protein, 16 aa, BK virus
RSEGKSLGSSTFLFFL

SEQ ID NO: 31458 - protein, 16 aa, BK virus
SEGKSLGSSTFLFFLG

SEQ ID NO: 31459 - protein, 16 aa, BK virus
EGKSLGSSTFLFFLGG

SEQ ID NO: 31460 - protein, 16 aa, BK virus
GKSLGSSTFLFFLGGV

SEQ ID NO: 31461 - protein, 16 aa, BK virus
KSLGSSTFLFFLGGVE

SEQ ID NO: 31462 - protein, 16 aa, BK virus
SLGSSTFLFFLGGVEC

SEQ ID NO: 31463 - protein, 16 aa, BK virus
ESAVASSSLANISSWQ

SEQ ID NO: 31464 - protein, 16 aa, BK virus
SAVASSSLANISSWQN

SEQ ID NO: 31465 - protein, 16 aa, BK virus
AVASSSLANISSWQNK

SEQ ID NO: 31466 - protein, 16 aa, BK virus
VASSSLANISSWQNKS

SEQ ID NO: 31467 - protein, 16 aa, BK virus
ASSSLANISSWQNKSS

SEQ ID NO: 31468 - protein, 16 aa, BK virus
SSSLANISSWQNKSSS

SEQ ID NO: 31469 - protein, 16 aa, BK virus
SSLANISSWQNKSSSH

SEQ ID NO: 31470 - protein, 16 aa, BK virus
SLANISSWQNKSSSHF

SEQ ID NO: 31471 - protein, 16 aa, BK virus
LANISSWQNKSSSHFS

SEQ ID NO: 31472 - protein, 16 aa, BK virus
ANISSWQNKSSSHFSL

SEQ ID NO: 31473 - protein, 16 aa, BK virus
NISSWQNKSSSHFSLK

SEQ ID NO: 31474 - protein, 16 aa, BK virus
ISSWQNKSSSHFSLKE

SEQ ID NO: 31475 - protein, 16 aa, BK virus
SSWQNKSSSHFSLKEL

SEQ ID NO: 31476 - protein, 16 aa, BK virus
SWQNKSSSHFSLKELH

SEQ ID NO: 31477 - protein, 16 aa, BK virus
WQNKSSSHFSLKELHQ

SEQ ID NO: 31478 - protein, 16 aa, BK virus
QNKSSSHFSLKELHQD

SEQ ID NO: 31479 - protein, 16 aa, BK virus
NKSSSHFSLKELHQDS

SEQ ID NO: 31480 - protein, 16 aa, BK virus
KSSSHFSLKELHQDSH

SEQ ID NO: 31481 - protein, 16 aa, BK virus
SSSHFSLKELHQDSHS

SEQ ID NO: 31482 - protein, 16 aa, BK virus
SSHFSLKELHQDSHSS

SEQ ID NO: 31483 - protein, 16 aa, BK virus
SHFSLKELHQDSHSSV

SEQ ID NO: 31484 - protein, 16 aa, BK virus
HFSLKELHQDSHSSVP

SEQ ID NO: 31485 - protein, 16 aa, BK virus
VGTYKKNNYLGPFNIL

SEQ ID NO: 31486 - protein, 16 aa, BK virus
GTYKKNNYLGPFNILL

SEQ ID NO: 31487 - protein, 16 aa, BK virus
TYKKNNYLGPFNILLF

SEQ ID NO: 31488 - protein, 16 aa, BK virus
YKKNNYLGPFNILLFI

SEQ ID NO: 31489 - protein, 16 aa, BK virus
REFLQLFGPTIAEFLQ

SEQ ID NO: 31490 - protein, 16 aa, BK virus
EFLQLFGPTIAEFLQL

SEQ ID NO: 31491 - protein, 16 aa, BK virus
FLQLFGPTIAEFLQLG

SEQ ID NO: 31492 - protein, 16 aa, BK virus
LQLFGPTIAEFLQLGL

SEQ ID NO: 31493 - protein, 16 aa, BK virus
QLFGPTIAEFLQLGLS

SEQ ID NO: 31494 - protein, 16 aa, BK virus
LFGPTIAEFLQLGLSQ

SEQ ID NO: 31495 - protein, 16 aa, BK virus
FGPTIAEFLQLGLSQT

SEQ ID NO: 31496 - protein, 16 aa, BK virus
GPTIAEFLQLGLSQTT

SEQ ID NO: 31497 - protein, 16 aa, BK virus
PTIAEFLQLGLSQTTV

SEQ ID NO: 31498 - protein, 16 aa, BK virus
SSQCSSNLSKPRALFL

SEQ ID NO: 31499 - protein, 16 aa, BK virus
SQCSSNLSKPRALFLK

SEQ ID NO: 31500 - protein, 16 aa, BK virus
QCSSNLSKPRALFLKI

SEQ ID NO: 31501 - protein, 16 aa, BK virus
CSSNLSKPRALFLKIF

SEQ ID NO: 31502 - protein, 16 aa, BK virus
SSNLSKPRALFLKIFY

SEQ ID NO: 31503 - protein, 16 aa, BK virus
SNLSKPRALFLKIFYL

SEQ ID NO: 31504 - protein, 16 aa, BK virus
NLSKPRALFLKIFYLN

SEQ ID NO: 31505 - protein, 16 aa, BK virus
LSKPRALFLKIFYLNA

SEQ ID NO: 31506 - protein, 16 aa, BK virus
SKPRALFLKIFYLNAL

SEQ ID NO: 31507 - protein, 16 aa, BK virus
KPRALFLKIFYLNALI

SEQ ID NO: 31508 - protein, 16 aa, BK virus
ADIACKGSAQKAFWNK

SEQ ID NO: 31509 - protein, 16 aa, BK virus
AIPCSTGYLGKEENQH

SEQ ID NO: 31510 - protein, 16 aa, BK virus
IPCSTGYLGKEENQHK

SEQ ID NO: 31511 - protein, 16 aa, BK virus
PCSTGYLGKEENQHKP

SEQ ID NO: 31512 - protein, 16 aa, BK virus
CSTGYLGKEENQHKPL

SEQ ID NO: 31513 - protein, 16 aa, BK virus
STGYLGKEENQHKPLS

SEQ ID NO: 31514 - protein, 16 aa, BK virus
TGYLGKEENQHKPLSY

SEQ ID NO: 31515 - protein, 16 aa, BK virus
GYLGKEENQHKPLSYS

SEQ ID NO: 31516 - protein, 16 aa, BK virus
YLGKEENQHKPLSYSR

SEQ ID NO: 31517 - protein, 16 aa, BK virus
LGKEENQHKPLSYSRF

SEQ ID NO: 31518 - protein, 16 aa, BK virus
GKEENQHKPLSYSRFQ

SEQ ID NO: 31519 - protein, 16 aa, BK virus
KEENQHKPLSYSRFQN

SEQ ID NO: 31520 - protein, 16 aa, BK virus
EENQHKPLSYSRFQNQ

SEQ ID NO: 31521 - protein, 16 aa, BK virus
ENQHKPLSYSRFQNQA

SEQ ID NO: 31522 - protein, 16 aa, BK virus
NQHKPLSYSRFQNQAD

SEQ ID NO: 31523 - protein, 16 aa, BK virus
QHKPLSYSRFQNQADE

SEQ ID NO: 31524 - protein, 16 aa, BK virus
HKPLSYSRFQNQADEL

SEQ ID NO: 31525 - protein, 16 aa, BK virus
KPLSYSRFQNQADELP

SEQ ID NO: 31526 - protein, 16 aa, BK virus
PLSYSRFQNQADELPL

SEQ ID NO: 31527 - protein, 16 aa, BK virus
LSYSRFQNQADELPLH

SEQ ID NO: 31528 - protein, 16 aa, BK virus
SYSRFQNQADELPLHP

SEQ ID NO: 31529 - protein, 16 aa, BK virus
YSRFQNQADELPLHPA

SEQ ID NO: 31530 - protein, 16 aa, BK virus
SRFQNQADELPLHPAP

SEQ ID NO: 31531 - protein, 16 aa, BK virus
RFQNQADELPLHPAPF

SEQ ID NO: 31532 - protein, 16 aa, BK virus
FQNQADELPLHPAPFF

SEQ ID NO: 31533 - protein, 16 aa, BK virus
QNQADELPLHPAPFFY

SEQ ID NO: 31534 - protein, 16 aa, BK virus
NQADELPLHPAPFFYT

SEQ ID NO: 31535 - protein, 16 aa, BK virus
QADELPLHPAPFFYTK

SEQ ID NO: 31536 - protein, 16 aa, BK virus
ADELPLHPAPFFYTKY

SEQ ID NO: 31537 - protein, 16 aa, BK virus
DELPLHPAPFFYTKYS

SEQ ID NO: 31538 - protein, 16 aa, BK virus
ELPLHPAPFFYTKYSF

SEQ ID NO: 31539 - protein, 16 aa, BK virus
LPLHPAPFFYTKYSFS

SEQ ID NO: 31540 - protein, 16 aa, BK virus
PLHPAPFFYTKYSFSS

SEQ ID NO: 31541 - protein, 16 aa, BK virus
LHPAPFFYTKYSFSSF

SEQ ID NO: 31542 - protein, 16 aa, BK virus
HPAPFFYTKYSFSSFY

SEQ ID NO: 31543 - protein, 16 aa, BK virus
PAPFFYTKYSFSSFYP

SEQ ID NO: 31544 - protein, 16 aa, BK virus
APFFYTKYSFSSFYPR

SEQ ID NO: 31545 - protein, 16 aa, BK virus
PFFYTKYSFSSFYPRR

SEQ ID NO: 31546 - protein, 16 aa, BK virus
FFYTKYSFSSFYPRRP

SEQ ID NO: 31547 - protein, 16 aa, BK virus
FYTKYSFSSFYPRRPL

SEQ ID NO: 31548 - protein, 16 aa, BK virus
YTKYSFSSFYPRRPLC

SEQ ID NO: 31549 - protein, 16 aa, BK virus
TKYSFSSFYPRRPLCQ

SEQ ID NO: 31550 - protein, 16 aa, BK virus
KYSFSSFYPRRPLCQG

SEQ ID NO: 31551 - protein, 16 aa, BK virus
YSFSSFYPRRPLCQGE

SEQ ID NO: 31552 - protein, 16 aa, BK virus
SFSSFYPRRPLCQGEI

SEQ ID NO: 31553 - protein, 16 aa, BK virus
FSSFYPRRPLCQGEIP

SEQ ID NO: 31554 - protein, 16 aa, BK virus
SSFYPRRPLCQGEIPY

SEQ ID NO: 31555 - protein, 16 aa, BK virus
SFYPRRPLCQGEIPYT

SEQ ID NO: 31556 - protein, 16 aa, BK virus
FYPRRPLCQGEIPYTS

SEQ ID NO: 31557 - protein, 16 aa, BK virus
YPRRPLCQGEIPYTSL

SEQ ID NO: 31558 - protein, 16 aa, BK virus
PRRPLCQGEIPYTSLN

SEQ ID NO: 31559 - protein, 16 aa, BK virus
RRPLCQGEIPYTSLNK

SEQ ID NO: 31560 - protein, 16 aa, BK virus
RPLCQGEIPYTSLNKL

SEQ ID NO: 31561 - protein, 16 aa, BK virus
PLCQGEIPYTSLNKLF

SEQ ID NO: 31562 - protein, 16 aa, BK virus
LCQGEIPYTSLNKLFS

SEQ ID NO: 31563 - protein, 16 aa, BK virus
CQGEIPYTSLNKLFSL

SEQ ID NO: 31564 - protein, 16 aa, BK virus
QGEIPYTSLNKLFSLR

SEQ ID NO: 31565 - protein, 16 aa, BK virus
GEIPYTSLNKLFSLRE

SEQ ID NO: 31566 - protein, 16 aa, BK virus
EIPYTSLNKLFSLRED

SEQ ID NO: 31567 - protein, 16 aa, BK virus
IPYTSLNKLFSLREDF

SEQ ID NO: 31568 - protein, 16 aa, BK virus
PYTSLNKLFSLREDFP

SEQ ID NO: 31569 - protein, 16 aa, BK virus
YTSLNKLFSLREDFPR

SEQ ID NO: 31570 - protein, 16 aa, BK virus
TSLNKLFSLREDFPRQ

SEQ ID NO: 31571 - protein, 16 aa, BK virus
SLNKLFSLREDFPRQL

SEQ ID NO: 31572 - protein, 16 aa, BK virus
LNKLFSLREDFPRQLF

SEQ ID NO: 31573 - protein, 16 aa, BK virus
NKLFSLREDFPRQLFQ

SEQ ID NO: 31574 - protein, 16 aa, BK virus
KLFSLREDFPRQLFQG

SEQ ID NO: 31575 - protein, 16 aa, BK virus
LFSLREDFPRQLFQGL

SEQ ID NO: 31576 - protein, 16 aa, BK virus
FSLREDFPRQLFQGLK

SEQ ID NO: 31577 - protein, 16 aa, BK virus
SLREDFPRQLFQGLKG

SEQ ID NO: 31578 - protein, 16 aa, BK virus
LREDFPRQLFQGLKGP

SEQ ID NO: 31579 - protein, 13 aa, BK virus
ASEKASTPLLLER

SEQ ID NO: 31580 - protein, 13 aa, BK virus
SEKASTPLLLERK

SEQ ID NO: 31581 - protein, 13 aa, BK virus
EKASTPLLLERKG

SEQ ID NO: 31582 - protein, 13 aa, BK virus
KASTPLLLERKGG

SEQ ID NO: 31583 - protein, 13 aa, BK virus
ASTPLLLERKGGG

SEQ ID NO: 31584 - protein, 13 aa, BK virus
STPLLLERKGGGR

SEQ ID NO: 31585 - protein, 13 aa, BK virus
TPLLLERKGGGRG

SEQ ID NO: 31586 - protein, 13 aa, BK virus
PLLLERKGGGRGG

SEQ ID NO: 31587 - protein, 13 aa, BK virus
LLLERKGGGRGGL

SEQ ID NO: 31588 - protein, 13 aa, BK virus
LLERKGGGRGGLG

SEQ ID NO: 31589 - protein, 13 aa, BK virus
LERKGGGRGGLGL

SEQ ID NO: 31590 - protein, 13 aa, BK virus
ERKGGGRGGLGLL

SEQ ID NO: 31591 - protein, 13 aa, BK virus
RKGGGRGGLGLLY

SEQ ID NO: 31592 - protein, 13 aa, BK virus
KGGGRGGLGLLYI

SEQ ID NO: 31593 - protein, 13 aa, BK virus
GGGRGGLGLLYII

SEQ ID NO: 31594 - protein, 13 aa, BK virus
GGRGGLGLLYIIK

SEQ ID NO: 31595 - protein, 13 aa, BK virus
GRGGLGLLYIIKK

SEQ ID NO: 31596 - protein, 13 aa, BK virus
RGGLGLLYIIKKK

SEQ ID NO: 31597 - protein, 13 aa, BK virus
GGLGLLYIIKKKA

SEQ ID NO: 31598 - protein, 13 aa, BK virus
GLGLLYIIKKKAT

SEQ ID NO: 31599 - protein, 13 aa, BK virus
LGLLYIIKKKATG

SEQ ID NO: 31600 - protein, 13 aa, BK virus
GLLYIIKKKATGR

SEQ ID NO: 31601 - protein, 13 aa, BK virus
LLYIIKKKATGRS

SEQ ID NO: 31602 - protein, 13 aa, BK virus
LYIIKKKATGRSC

SEQ ID NO: 31603 - protein, 13 aa, BK virus
YIIKKKATGRSCL

SEQ ID NO: 31604 - protein, 13 aa, BK virus
IIKKKATGRSCLP

SEQ ID NO: 31605 - protein, 13 aa, BK virus
IKKKATGRSCLPM

SEQ ID NO: 31606 - protein, 13 aa, BK virus
KKKATGRSCLPME

SEQ ID NO: 31607 - protein, 13 aa, BK virus
KKATGRSCLPMEC

SEQ ID NO: 31608 - protein, 13 aa, BK virus
KATGRSCLPMECS

SEQ ID NO: 31609 - protein, 13 aa, BK virus
ATGRSCLPMECSQ

SEQ ID NO: 31610 - protein, 13 aa, BK virus
TGRSCLPMECSQT

SEQ ID NO: 31611 - protein, 13 aa, BK virus
GRSCLPMECSQTM

SEQ ID NO: 31612 - protein, 13 aa, BK virus
RSCLPMECSQTMT

SEQ ID NO: 31613 - protein, 13 aa, BK virus
SCLPMECSQTMTS

SEQ ID NO: 31614 - protein, 13 aa, BK virus
CLPMECSQTMTSG

SEQ ID NO: 31615 - protein, 13 aa, BK virus
LPMECSQTMTSGR

SEQ ID NO: 31616 - protein, 13 aa, BK virus
PMECSQTMTSGRK

SEQ ID NO: 31617 - protein, 13 aa, BK virus
MECSQTMTSGRKV

SEQ ID NO: 31618 - protein, 13 aa, BK virus
ECSQTMTSGRKVH

SEQ ID NO: 31619 - protein, 13 aa, BK virus
CSQTMTSGRKVHD

SEQ ID NO: 31620 - protein, 13 aa, BK virus
SQTMTSGRKVHDS

SEQ ID NO: 31621 - protein, 13 aa, BK virus
QTMTSGRKVHDSQ

SEQ ID NO: 31622 - protein, 13 aa, BK virus
TMTSGRKVHDSQG

SEQ ID NO: 31623 - protein, 13 aa, BK virus
MTSGRKVHDSQGN

SEQ ID NO: 31624 - protein, 13 aa, BK virus
TSGRKVHDSQGNA

SEQ ID NO: 31625 - protein, 13 aa, BK virus
SGRKVHDSQGNAA

SEQ ID NO: 31626 - protein, 13 aa, BK virus
GRKVHDSQGNAAK

SEQ ID NO: 31627 - protein, 13 aa, BK virus
RKVHDSQGNAAKP

SEQ ID NO: 31628 - protein, 13 aa, BK virus
PQEGKCMTHREEL

SEQ ID NO: 31629 - protein, 13 aa, BK virus
QEGKCMTHREELL

SEQ ID NO: 31630 - protein, 13 aa, BK virus
EGKCMTHREELLT

SEQ ID NO: 31631 - protein, 13 aa, BK virus
GKCMTHREELLTH

SEQ ID NO: 31632 - protein, 13 aa, BK virus
KCMTHREELLTHG

SEQ ID NO: 31633 - protein, 13 aa, BK virus
CMTHREELLTHGM

SEQ ID NO: 31634 - protein, 13 aa, BK virus
MTHREELLTHGMQ

SEQ ID NO: 31635 - protein, 13 aa, BK virus
THREELLTHGMQP

SEQ ID NO: 31636 - protein, 13 aa, BK virus
HREELLTHGMQPN

SEQ ID NO: 31637 - protein, 13 aa, BK virus
REELLTHGMQPNH

SEQ ID NO: 31638 - protein, 13 aa, BK virus
EELLTHGMQPNHD

SEQ ID NO: 31639 - protein, 13 aa, BK virus
ELLTHGMQPNHDL

SEQ ID NO: 31640 - protein, 13 aa, BK virus
LLTHGMQPNHDLR

SEQ ID NO: 31641 - protein, 13 aa, BK virus
LTHGMQPNHDLRK

SEQ ID NO: 31642 - protein, 13 aa, BK virus
THGMQPNHDLRKE

SEQ ID NO: 31643 - protein, 13 aa, BK virus
HGMQPNHDLRKES

SEQ ID NO: 31644 - protein, 13 aa, BK virus
GMQPNHDLRKESA

SEQ ID NO: 31645 - protein, 13 aa, BK virus
QTCFASLGILALS

SEQ ID NO: 31646 - protein, 13 aa, BK virus
TCFASLGILALSP

SEQ ID NO: 31647 - protein, 13 aa, BK virus
CFASLGILALSPV

SEQ ID NO: 31648 - protein, 13 aa, BK virus
FASLGILALSPVK

SEQ ID NO: 31649 - protein, 13 aa, BK virus
ASLGILALSPVKL

SEQ ID NO: 31650 - protein, 13 aa, BK virus
SLGILALSPVKLD

SEQ ID NO: 31651 - protein, 13 aa, BK virus
LGILALSPVKLDK

SEQ ID NO: 31652 - protein, 13 aa, BK virus
GILALSPVKLDKG

SEQ ID NO: 31653 - protein, 13 aa, BK virus
ILALSPVKLDKGH

SEQ ID NO: 31654 - protein, 13 aa, BK virus
LALSPVKLDKGHG

SEQ ID NO: 31655 - protein, 13 aa, BK virus
ALSPVKLDKGHGS

SEQ ID NO: 31656 - protein, 13 aa, BK virus
LSPVKLDKGHGSA

SEQ ID NO: 31657 - protein, 13 aa, BK virus
SPVKLDKGHGSAP

SEQ ID NO: 31658 - protein, 13 aa, BK virus
PVKLDKGHGSAPA

SEQ ID NO: 31659 - protein, 13 aa, BK virus
VKLDKGHGSAPAV

SEQ ID NO: 31660 - protein, 13 aa, BK virus
KLDKGHGSAPAVT

SEQ ID NO: 31661 - protein, 13 aa, BK virus
LDKGHGSAPAVTT

SEQ ID NO: 31662 - protein, 13 aa, BK virus
DKGHGSAPAVTTS

SEQ ID NO: 31663 - protein, 13 aa, BK virus
KGHGSAPAVTTSF

SEQ ID NO: 31664 - protein, 13 aa, BK virus
GHGSAPAVTTSFS

SEQ ID NO: 31665 - protein, 13 aa, BK virus
HGSAPAVTTSFSE

SEQ ID NO: 31666 - protein, 13 aa, BK virus
GSAPAVTTSFSES

SEQ ID NO: 31667 - protein, 13 aa, BK virus
SAPAVTTSFSESW

SEQ ID NO: 31668 - protein, 13 aa, BK virus
NLDWNKKKSSEDF

SEQ ID NO: 31669 - protein, 13 aa, BK virus
LDWNKKKSSEDFY

SEQ ID NO: 31670 - protein, 13 aa, BK virus
DWNKKKSSEDFYF

SEQ ID NO: 31671 - protein, 13 aa, BK virus
WNKKKSSEDFYFY

SEQ ID NO: 31672 - protein, 13 aa, BK virus
NKKKSSEDFYFYF

SEQ ID NO: 31673 - protein, 13 aa, BK virus
KKKSSEDFYFYFR

SEQ ID NO: 31674 - protein, 13 aa, BK virus
KKSSEDFYFYFRA

SEQ ID NO: 31675 - protein, 13 aa, BK virus
KSSEDFYFYFRAF

SEQ ID NO: 31676 - protein, 13 aa, BK virus
SSEDFYFYFRAFA

SEQ ID NO: 31677 - protein, 13 aa, BK virus
SEDFYFYFRAFAG

SEQ ID NO: 31678 - protein, 13 aa, BK virus
EDFYFYFRAFAGI

SEQ ID NO: 31679 - protein, 13 aa, BK virus
DFYFYFRAFAGIL

SEQ ID NO: 31680 - protein, 13 aa, BK virus
RQCRREKQKYHCF

SEQ ID NO: 31681 - protein, 13 aa, BK virus
QCRREKQKYHCFT

SEQ ID NO: 31682 - protein, 13 aa, BK virus
CRREKQKYHCFTC

SEQ ID NO: 31683 - protein, 13 aa, BK virus
RREKQKYHCFTCC

SEQ ID NO: 31684 - protein, 13 aa, BK virus
REKQKYHCFTCCK

SEQ ID NO: 31685 - protein, 13 aa, BK virus
EKQKYHCFTCCKR

SEQ ID NO: 31686 - protein, 13 aa, BK virus
KQKYHCFTCCKRL

SEQ ID NO: 31687 - protein, 13 aa, BK virus
QKYHCFTCCKRLC

SEQ ID NO: 31688 - protein, 13 aa, BK virus
KYHCFTCCKRLCK

SEQ ID NO: 31689 - protein, 13 aa, BK virus
YHCFTCCKRLCKR

SEQ ID NO: 31690 - protein, 13 aa, BK virus
HCFTCCKRLCKRL

SEQ ID NO: 31691 - protein, 13 aa, BK virus
CFTCCKRLCKRLL

SEQ ID NO: 31692 - protein, 13 aa, BK virus
FTCCKRLCKRLLG

SEQ ID NO: 31693 - protein, 13 aa, BK virus
TCCKRLCKRLLGK

SEQ ID NO: 31694 - protein, 13 aa, BK virus
SLFFCISRFMGAA

SEQ ID NO: 31695 - protein, 13 aa, BK virus
LFFCISRFMGAAL

SEQ ID NO: 31696 - protein, 13 aa, BK virus
FFCISRFMGAALA

SEQ ID NO: 31697 - protein, 13 aa, BK virus
FCISRFMGAALAL

SEQ ID NO: 31698 - protein, 13 aa, BK virus
CISRFMGAALALL

SEQ ID NO: 31699 - protein, 13 aa, BK virus
ISRFMGAALALLG

SEQ ID NO: 31700 - protein, 13 aa, BK virus
SRFMGAALALLGD

SEQ ID NO: 31701 - protein, 13 aa, BK virus
RFMGAALALLGDL

SEQ ID NO: 31702 - protein, 13 aa, BK virus
FMGAALALLGDLV

SEQ ID NO: 31703 - protein, 13 aa, BK virus
MGAALALLGDLVA

SEQ ID NO: 31704 - protein, 13 aa, BK virus
GAALALLGDLVAS

SEQ ID NO: 31705 - protein, 13 aa, BK virus
AALALLGDLVASV

SEQ ID NO: 31706 - protein, 13 aa, BK virus
ALALLGDLVASVS

SEQ ID NO: 31707 - protein, 13 aa, BK virus
LALLGDLVASVSE

SEQ ID NO: 31708 - protein, 13 aa, BK virus
ALLGDLVASVSEA

SEQ ID NO: 31709 - protein, 13 aa, BK virus
LLGDLVASVSEAA

SEQ ID NO: 31710 - protein, 13 aa, BK virus
LGDLVASVSEAAA

SEQ ID NO: 31711 - protein, 13 aa, BK virus
GDLVASVSEAAAA

SEQ ID NO: 31712 - protein, 13 aa, BK virus
DLVASVSEAAAAT

SEQ ID NO: 31713 - protein, 13 aa, BK virus
LVASVSEAAAATG

SEQ ID NO: 31714 - protein, 13 aa, BK virus
VASVSEAAAATGF

SEQ ID NO: 31715 - protein, 13 aa, BK virus
ASVSEAAAATGFS

SEQ ID NO: 31716 - protein, 13 aa, BK virus
SVSEAAAATGFSV

SEQ ID NO: 31717 - protein, 13 aa, BK virus
VSEAAAATGFSVA

SEQ ID NO: 31718 - protein, 13 aa, BK virus
SEAAAATGFSVAE

SEQ ID NO: 31719 - protein, 13 aa, BK virus
EAAAATGFSVAEI

SEQ ID NO: 31720 - protein, 13 aa, BK virus
AAAATGFSVAEIA

SEQ ID NO: 31721 - protein, 13 aa, BK virus
AAATGFSVAEIAA

SEQ ID NO: 31722 - protein, 13 aa, BK virus
AATGFSVAEIAAG

SEQ ID NO: 31723 - protein, 13 aa, BK virus
ATGFSVAEIAAGE

SEQ ID NO: 31724 - protein, 13 aa, BK virus
TGFSVAEIAAGEA

SEQ ID NO: 31725 - protein, 13 aa, BK virus
GFSVAEIAAGEAA

SEQ ID NO: 31726 - protein, 13 aa, BK virus
FSVAEIAAGEAAA

SEQ ID NO: 31727 - protein, 13 aa, BK virus
SVAEIAAGEAAAA

SEQ ID NO: 31728 - protein, 13 aa, BK virus
VAEIAAGEAAAAI

SEQ ID NO: 31729 - protein, 13 aa, BK virus
AEIAAGEAAAAIE

SEQ ID NO: 31730 - protein, 13 aa, BK virus
EIAAGEAAAAIEV

SEQ ID NO: 31731 - protein, 13 aa, BK virus
IAAGEAAAAIEVQ

SEQ ID NO: 31732 - protein, 13 aa, BK virus
AAGEAAAAIEVQI

SEQ ID NO: 31733 - protein, 13 aa, BK virus
AGEAAAAIEVQIA

SEQ ID NO: 31734 - protein, 13 aa, BK virus
GEAAAAIEVQIAS

SEQ ID NO: 31735 - protein, 13 aa, BK virus
EAAAAIEVQIASL

SEQ ID NO: 31736 - protein, 13 aa, BK virus
AAAAIEVQIASLA

SEQ ID NO: 31737 - protein, 13 aa, BK virus
AAAIEVQIASLAT

SEQ ID NO: 31738 - protein, 13 aa, BK virus
AAIEVQIASLATV

SEQ ID NO: 31739 - protein, 13 aa, BK virus
AIEVQIASLATVE

SEQ ID NO: 31740 - protein, 13 aa, BK virus
IEVQIASLATVEG

SEQ ID NO: 31741 - protein, 13 aa, BK virus
EVQIASLATVEGI

SEQ ID NO: 31742 - protein, 13 aa, BK virus
VQIASLATVEGIT

SEQ ID NO: 31743 - protein, 13 aa, BK virus
QIASLATVEGITS

SEQ ID NO: 31744 - protein, 13 aa, BK virus
IASLATVEGITST

SEQ ID NO: 31745 - protein, 13 aa, BK virus
ASLATVEGITSTS

SEQ ID NO: 31746 - protein, 13 aa, BK virus
SLATVEGITSTSE

SEQ ID NO: 31747 - protein, 13 aa, BK virus
LATVEGITSTSEA

SEQ ID NO: 31748 - protein, 13 aa, BK virus
ATVEGITSTSEAI

SEQ ID NO: 31749 - protein, 13 aa, BK virus
TVEGITSTSEAIA

SEQ ID NO: 31750 - protein, 13 aa, BK virus
VEGITSTSEAIAA

SEQ ID NO: 31751 - protein, 13 aa, BK virus
EGITSTSEAIAAI

SEQ ID NO: 31752 - protein, 13 aa, BK virus
GITSTSEAIAAIG

SEQ ID NO: 31753 - protein, 13 aa, BK virus
ITSTSEAIAAIGL

SEQ ID NO: 31754 - protein, 13 aa, BK virus
TSTSEAIAAIGLT

SEQ ID NO: 31755 - protein, 13 aa, BK virus
STSEAIAAIGLTP

SEQ ID NO: 31756 - protein, 13 aa, BK virus
TSEAIAAIGLTPQ

SEQ ID NO: 31757 - protein, 13 aa, BK virus
SEAIAAIGLTPQT

SEQ ID NO: 31758 - protein, 13 aa, BK virus
EAIAAIGLTPQTY

SEQ ID NO: 31759 - protein, 13 aa, BK virus
AIAAIGLTPQTYA

SEQ ID NO: 31760 - protein, 13 aa, BK virus
IAAIGLTPQTYAV

SEQ ID NO: 31761 - protein, 13 aa, BK virus
AAIGLTPQTYAVI

SEQ ID NO: 31762 - protein, 13 aa, BK virus
AIGLTPQTYAVIA

SEQ ID NO: 31763 - protein, 13 aa, BK virus
IGLTPQTYAVIAG

SEQ ID NO: 31764 - protein, 13 aa, BK virus
GLTPQTYAVIAGA

SEQ ID NO: 31765 - protein, 13 aa, BK virus
LTPQTYAVIAGAP

SEQ ID NO: 31766 - protein, 13 aa, BK virus
TPQTYAVIAGAPG

SEQ ID NO: 31767 - protein, 13 aa, BK virus
PQTYAVIAGAPGA

SEQ ID NO: 31768 - protein, 13 aa, BK virus
QTYAVIAGAPGAI

SEQ ID NO: 31769 - protein, 13 aa, BK virus
TYAVIAGAPGAIA

SEQ ID NO: 31770 - protein, 13 aa, BK virus
YAVIAGAPGAIAG

SEQ ID NO: 31771 - protein, 13 aa, BK virus
AVIAGAPGAIAGF

SEQ ID NO: 31772 - protein, 13 aa, BK virus
VIAGAPGAIAGFA

SEQ ID NO: 31773 - protein, 13 aa, BK virus
IAGAPGAIAGFAA

SEQ ID NO: 31774 - protein, 13 aa, BK virus
AGAPGAIAGFAAL

SEQ ID NO: 31775 - protein, 13 aa, BK virus
GAPGAIAGFAALI

SEQ ID NO: 31776 - protein, 13 aa, BK virus
APGAIAGFAALIQ

SEQ ID NO: 31777 - protein, 13 aa, BK virus
PGAIAGFAALIQT

SEQ ID NO: 31778 - protein, 13 aa, BK virus
GAIAGFAALIQTV

SEQ ID NO: 31779 - protein, 13 aa, BK virus
AIAGFAALIQTVS

SEQ ID NO: 31780 - protein, 13 aa, BK virus
IAGFAALIQTVSG

SEQ ID NO: 31781 - protein, 13 aa, BK virus
AGFAALIQTVSGI

SEQ ID NO: 31782 - protein, 13 aa, BK virus
GFAALIQTVSGIS

SEQ ID NO: 31783 - protein, 13 aa, BK virus
FAALIQTVSGISS

SEQ ID NO: 31784 - protein, 13 aa, BK virus
AALIQTVSGISSL

SEQ ID NO: 31785 - protein, 13 aa, BK virus
ALIQTVSGISSLA

SEQ ID NO: 31786 - protein, 13 aa, BK virus
LIQTVSGISSLAQ

SEQ ID NO: 31787 - protein, 13 aa, BK virus
IQTVSGISSLAQV

SEQ ID NO: 31788 - protein, 13 aa, BK virus
QTVSGISSLAQVG

SEQ ID NO: 31789 - protein, 13 aa, BK virus
TVSGISSLAQVGY

SEQ ID NO: 31790 - protein, 13 aa, BK virus
VSGISSLAQVGYK

SEQ ID NO: 31791 - protein, 13 aa, BK virus
SGISSLAQVGYKF

SEQ ID NO: 31792 - protein, 13 aa, BK virus
GISSLAQVGYKFF

SEQ ID NO: 31793 - protein, 13 aa, BK virus
ISSLAQVGYKFFD

SEQ ID NO: 31794 - protein, 13 aa, BK virus
SSLAQVGYKFFDD

SEQ ID NO: 31795 - protein, 13 aa, BK virus
SLAQVGYKFFDDW

SEQ ID NO: 31796 - protein, 13 aa, BK virus
LAQVGYKFFDDWD

SEQ ID NO: 31797 - protein, 13 aa, BK virus
AQVGYKFFDDWDH

SEQ ID NO: 31798 - protein, 13 aa, BK virus
QVGYKFFDDWDHK

SEQ ID NO: 31799 - protein, 13 aa, BK virus
VGYKFFDDWDHKV

SEQ ID NO: 31800 - protein, 13 aa, BK virus
GYKFFDDWDHKVS

SEQ ID NO: 31801 - protein, 13 aa, BK virus
YKFFDDWDHKVST

SEQ ID NO: 31802 - protein, 13 aa, BK virus
KFFDDWDHKVSTV

SEQ ID NO: 31803 - protein, 13 aa, BK virus
FFDDWDHKVSTVG

SEQ ID NO: 31804 - protein, 13 aa, BK virus
FDDWDHKVSTVGL

SEQ ID NO: 31805 - protein, 13 aa, BK virus
DDWDHKVSTVGLY

SEQ ID NO: 31806 - protein, 13 aa, BK virus
DWDHKVSTVGLYQ

SEQ ID NO: 31807 - protein, 13 aa, BK virus
WDHKVSTVGLYQQ

SEQ ID NO: 31808 - protein, 13 aa, BK virus
DHKVSTVGLYQQS

SEQ ID NO: 31809 - protein, 13 aa, BK virus
HKVSTVGLYQQSG

SEQ ID NO: 31810 - protein, 13 aa, BK virus
KVSTVGLYQQSGM

SEQ ID NO: 31811 - protein, 13 aa, BK virus
VSTVGLYQQSGMA

SEQ ID NO: 31812 - protein, 13 aa, BK virus
STVGLYQQSGMAL

SEQ ID NO: 31813 - protein, 13 aa, BK virus
TVGLYQQSGMALE

SEQ ID NO: 31814 - protein, 13 aa, BK virus
VGLYQQSGMALEL

SEQ ID NO: 31815 - protein, 13 aa, BK virus
GLYQQSGMALELF

SEQ ID NO: 31816 - protein, 13 aa, BK virus
LYQQSGMALELFN

SEQ ID NO: 31817 - protein, 13 aa, BK virus
YQQSGMALELFNP

SEQ ID NO: 31818 - protein, 13 aa, BK virus
QQSGMALELFNPD

SEQ ID NO: 31819 - protein, 13 aa, BK virus
QSGMALELFNPDE

SEQ ID NO: 31820 - protein, 13 aa, BK virus
SGMALELFNPDEY

SEQ ID NO: 31821 - protein, 13 aa, BK virus
GMALELFNPDEYY

SEQ ID NO: 31822 - protein, 13 aa, BK virus
MALELFNPDEYYD

SEQ ID NO: 31823 - protein, 13 aa, BK virus
ALELFNPDEYYDI

SEQ ID NO: 31824 - protein, 13 aa, BK virus
LELFNPDEYYDIL

SEQ ID NO: 31825 - protein, 13 aa, BK virus
ELFNPDEYYDILF

SEQ ID NO: 31826 - protein, 13 aa, BK virus
LFNPDEYYDILFP

SEQ ID NO: 31827 - protein, 13 aa, BK virus
FNPDEYYDILFPG

SEQ ID NO: 31828 - protein, 13 aa, BK virus
NPDEYYDILFPGV

SEQ ID NO: 31829 - protein, 13 aa, BK virus
PDEYYDILFPGVN

SEQ ID NO: 31830 - protein, 13 aa, BK virus
DEYYDILFPGVNT

SEQ ID NO: 31831 - protein, 13 aa, BK virus
EYYDILFPGVNTF

SEQ ID NO: 31832 - protein, 13 aa, BK virus
YYDILFPGVNTFV

SEQ ID NO: 31833 - protein, 13 aa, BK virus
YDILFPGVNTFVN

SEQ ID NO: 31834 - protein, 13 aa, BK virus
DILFPGVNTFVNN

SEQ ID NO: 31835 - protein, 13 aa, BK virus
ILFPGVNTFVNNI

SEQ ID NO: 31836 - protein, 13 aa, BK virus
LFPGVNTFVNNIQ

SEQ ID NO: 31837 - protein, 13 aa, BK virus
FPGVNTFVNNIQY

SEQ ID NO: 31838 - protein, 13 aa, BK virus
PGVNTFVNNIQYL

SEQ ID NO: 31839 - protein, 13 aa, BK virus
GVNTFVNNIQYLD

SEQ ID NO: 31840 - protein, 13 aa, BK virus
VNTFVNNIQYLDP

SEQ ID NO: 31841 - protein, 13 aa, BK virus
NTFVNNIQYLDPR

SEQ ID NO: 31842 - protein, 13 aa, BK virus
TFVNNIQYLDPRH

SEQ ID NO: 31843 - protein, 13 aa, BK virus
FVNNIQYLDPRHW

SEQ ID NO: 31844 - protein, 13 aa, BK virus
VNNIQYLDPRHWG

SEQ ID NO: 31845 - protein, 13 aa, BK virus
NNIQYLDPRHWGP

SEQ ID NO: 31846 - protein, 13 aa, BK virus
NIQYLDPRHWGPS

SEQ ID NO: 31847 - protein, 13 aa, BK virus
IQYLDPRHWGPSL

SEQ ID NO: 31848 - protein, 13 aa, BK virus
QYLDPRHWGPSLF

SEQ ID NO: 31849 - protein, 13 aa, BK virus
YLDPRHWGPSLFA

SEQ ID NO: 31850 - protein, 13 aa, BK virus
LDPRHWGPSLFAT

SEQ ID NO: 31851 - protein, 13 aa, BK virus
DPRHWGPSLFATI

SEQ ID NO: 31852 - protein, 13 aa, BK virus
PRHWGPSLFATIS

SEQ ID NO: 31853 - protein, 13 aa, BK virus
RHWGPSLFATISQ

SEQ ID NO: 31854 - protein, 13 aa, BK virus
HWGPSLFATISQA

SEQ ID NO: 31855 - protein, 13 aa, BK virus
WGPSLFATISQAL

SEQ ID NO: 31856 - protein, 13 aa, BK virus
GPSLFATISQALW

SEQ ID NO: 31857 - protein, 13 aa, BK virus
PSLFATISQALWH

SEQ ID NO: 31858 - protein, 13 aa, BK virus
SLFATISQALWHV

SEQ ID NO: 31859 - protein, 13 aa, BK virus
LFATISQALWHVI

SEQ ID NO: 31860 - protein, 13 aa, BK virus
FATISQALWHVIR

SEQ ID NO: 31861 - protein, 13 aa, BK virus
ATISQALWHVIRD

SEQ ID NO: 31862 - protein, 13 aa, BK virus
TISQALWHVIRDD

SEQ ID NO: 31863 - protein, 13 aa, BK virus
ISQALWHVIRDDI

SEQ ID NO: 31864 - protein, 13 aa, BK virus
SQALWHVIRDDIP

SEQ ID NO: 31865 - protein, 13 aa, BK virus
QALWHVIRDDIPS

SEQ ID NO: 31866 - protein, 13 aa, BK virus
ALWHVIRDDIPSI

SEQ ID NO: 31867 - protein, 13 aa, BK virus
LWHVIRDDIPSIT

SEQ ID NO: 31868 - protein, 13 aa, BK virus
WHVIRDDIPSITS

SEQ ID NO: 31869 - protein, 13 aa, BK virus
HVIRDDIPSITSQ

SEQ ID NO: 31870 - protein, 13 aa, BK virus
VIRDDIPSITSQE

SEQ ID NO: 31871 - protein, 13 aa, BK virus
IRDDIPSITSQEL

SEQ ID NO: 31872 - protein, 13 aa, BK virus
RDDIPSITSQELQ

SEQ ID NO: 31873 - protein, 13 aa, BK virus
DDIPSITSQELQR

SEQ ID NO: 31874 - protein, 13 aa, BK virus
DIPSITSQELQRR

SEQ ID NO: 31875 - protein, 13 aa, BK virus
IPSITSQELQRRT

SEQ ID NO: 31876 - protein, 13 aa, BK virus
PSITSQELQRRTE

SEQ ID NO: 31877 - protein, 13 aa, BK virus
SITSQELQRRTER

SEQ ID NO: 31878 - protein, 13 aa, BK virus
ITSQELQRRTERF

SEQ ID NO: 31879 - protein, 13 aa, BK virus
TSQELQRRTERFF

SEQ ID NO: 31880 - protein, 13 aa, BK virus
SQELQRRTERFFR

SEQ ID NO: 31881 - protein, 13 aa, BK virus
QELQRRTERFFRD

SEQ ID NO: 31882 - protein, 13 aa, BK virus
ELQRRTERFFRDS

SEQ ID NO: 31883 - protein, 13 aa, BK virus
LQRRTERFFRDSL

SEQ ID NO: 31884 - protein, 13 aa, BK virus
QRRTERFFRDSLA

SEQ ID NO: 31885 - protein, 13 aa, BK virus
RRTERFFRDSLAR

SEQ ID NO: 31886 - protein, 13 aa, BK virus
RTERFFRDSLARF

SEQ ID NO: 31887 - protein, 13 aa, BK virus
TERFFRDSLARFL

SEQ ID NO: 31888 - protein, 13 aa, BK virus
ERFFRDSLARFLE

SEQ ID NO: 31889 - protein, 13 aa, BK virus
RFFRDSLARFLEE

SEQ ID NO: 31890 - protein, 13 aa, BK virus
FFRDSLARFLEET

SEQ ID NO: 31891 - protein, 13 aa, BK virus
FRDSLARFLEETT

SEQ ID NO: 31892 - protein, 13 aa, BK virus
RDSLARFLEETTW

SEQ ID NO: 31893 - protein, 13 aa, BK virus
DSLARFLEETTWT

SEQ ID NO: 31894 - protein, 13 aa, BK virus
SLARFLEETTWTI

SEQ ID NO: 31895 - protein, 13 aa, BK virus
LARFLEETTWTIV

SEQ ID NO: 31896 - protein, 13 aa, BK virus
ARFLEETTWTIVN

SEQ ID NO: 31897 - protein, 13 aa, BK virus
RFLEETTWTIVNA

SEQ ID NO: 31898 - protein, 13 aa, BK virus
FLEETTWTIVNAP

SEQ ID NO: 31899 - protein, 13 aa, BK virus
LEETTWTIVNAPI

SEQ ID NO: 31900 - protein, 13 aa, BK virus
EETTWTIVNAPIN

SEQ ID NO: 31901 - protein, 13 aa, BK virus
ETTWTIVNAPINF

SEQ ID NO: 31902 - protein, 13 aa, BK virus
TTWTIVNAPINFY

SEQ ID NO: 31903 - protein, 13 aa, BK virus
TWTIVNAPINFYN

SEQ ID NO: 31904 - protein, 13 aa, BK virus
WTIVNAPINFYNY

SEQ ID NO: 31905 - protein, 13 aa, BK virus
TIVNAPINFYNYI

SEQ ID NO: 31906 - protein, 13 aa, BK virus
IVNAPINFYNYIQ

SEQ ID NO: 31907 - protein, 13 aa, BK virus
VNAPINFYNYIQQ

SEQ ID NO: 31908 - protein, 13 aa, BK virus
NAPINFYNYIQQY

SEQ ID NO: 31909 - protein, 13 aa, BK virus
APINFYNYIQQYY

SEQ ID NO: 31910 - protein, 13 aa, BK virus
PINFYNYIQQYYS

SEQ ID NO: 31911 - protein, 13 aa, BK virus
INFYNYIQQYYSD

SEQ ID NO: 31912 - protein, 13 aa, BK virus
NFYNYIQQYYSDL

SEQ ID NO: 31913 - protein, 13 aa, BK virus
FYNYIQQYYSDLS

SEQ ID NO: 31914 - protein, 13 aa, BK virus
YNYIQQYYSDLSP

SEQ ID NO: 31915 - protein, 13 aa, BK virus
NYIQQYYSDLSPI

SEQ ID NO: 31916 - protein, 13 aa, BK virus
YIQQYYSDLSPIR

SEQ ID NO: 31917 - protein, 13 aa, BK virus
IQQYYSDLSPIRP

SEQ ID NO: 31918 - protein, 13 aa, BK virus
QQYYSDLSPIRPS

SEQ ID NO: 31919 - protein, 13 aa, BK virus
QYYSDLSPIRPSM

SEQ ID NO: 31920 - protein, 13 aa, BK virus
YYSDLSPIRPSMV

SEQ ID NO: 31921 - protein, 13 aa, BK virus
YSDLSPIRPSMVR

SEQ ID NO: 31922 - protein, 13 aa, BK virus
SDLSPIRPSMVRQ

SEQ ID NO: 31923 - protein, 13 aa, BK virus
DLSPIRPSMVRQV

SEQ ID NO: 31924 - protein, 13 aa, BK virus
LSPIRPSMVRQVA

SEQ ID NO: 31925 - protein, 13 aa, BK virus
SPIRPSMVRQVAE

SEQ ID NO: 31926 - protein, 13 aa, BK virus
PIRPSMVRQVAER

SEQ ID NO: 31927 - protein, 13 aa, BK virus
IRPSMVRQVAERE

SEQ ID NO: 31928 - protein, 13 aa, BK virus
RPSMVRQVAEREG

SEQ ID NO: 31929 - protein, 13 aa, BK virus
PSMVRQVAEREGT

SEQ ID NO: 31930 - protein, 13 aa, BK virus
SMVRQVAEREGTR

SEQ ID NO: 31931 - protein, 13 aa, BK virus
MVRQVAEREGTRV

SEQ ID NO: 31932 - protein, 13 aa, BK virus
VRQVAEREGTRVH

SEQ ID NO: 31933 - protein, 13 aa, BK virus
RQVAEREGTRVHF

SEQ ID NO: 31934 - protein, 13 aa, BK virus
QVAEREGTRVHFG

SEQ ID NO: 31935 - protein, 13 aa, BK virus
VAEREGTRVHFGH

SEQ ID NO: 31936 - protein, 13 aa, BK virus
AEREGTRVHFGHT

SEQ ID NO: 31937 - protein, 13 aa, BK virus
EREGTRVHFGHTY

SEQ ID NO: 31938 - protein, 13 aa, BK virus
REGTRVHFGHTYS

SEQ ID NO: 31939 - protein, 13 aa, BK virus
EGTRVHFGHTYSI

SEQ ID NO: 31940 - protein, 13 aa, BK virus
GTRVHFGHTYSID

SEQ ID NO: 31941 - protein, 13 aa, BK virus
TRVHFGHTYSIDD

SEQ ID NO: 31942 - protein, 13 aa, BK virus
RVHFGHTYSIDDA

SEQ ID NO: 31943 - protein, 13 aa, BK virus
VHFGHTYSIDDAD

SEQ ID NO: 31944 - protein, 13 aa, BK virus
HFGHTYSIDDADS

SEQ ID NO: 31945 - protein, 13 aa, BK virus
FGHTYSIDDADSI

SEQ ID NO: 31946 - protein, 13 aa, BK virus
GHTYSIDDADSIE

SEQ ID NO: 31947 - protein, 13 aa, BK virus
HTYSIDDADSIEE

SEQ ID NO: 31948 - protein, 13 aa, BK virus
TYSIDDADSIEEV

SEQ ID NO: 31949 - protein, 13 aa, BK virus
YSIDDADSIEEVT

SEQ ID NO: 31950 - protein, 13 aa, BK virus
SIDDADSIEEVTQ

SEQ ID NO: 31951 - protein, 13 aa, BK virus
IDDADSIEEVTQR

SEQ ID NO: 31952 - protein, 13 aa, BK virus
DDADSIEEVTQRM

SEQ ID NO: 31953 - protein, 13 aa, BK virus
DADSIEEVTQRMD

SEQ ID NO: 31954 - protein, 13 aa, BK virus
ADSIEEVTQRMDL

SEQ ID NO: 31955 - protein, 13 aa, BK virus
DSIEEVTQRMDLR

SEQ ID NO: 31956 - protein, 13 aa, BK virus
SIEEVTQRMDLRN

SEQ ID NO: 31957 - protein, 13 aa, BK virus
IEEVTQRMDLRNQ

SEQ ID NO: 31958 - protein, 13 aa, BK virus
EEVTQRMDLRNQQ

SEQ ID NO: 31959 - protein, 13 aa, BK virus
EVTQRMDLRNQQS

SEQ ID NO: 31960 - protein, 13 aa, BK virus
VTQRMDLRNQQSV

SEQ ID NO: 31961 - protein, 13 aa, BK virus
TQRMDLRNQQSVH

SEQ ID NO: 31962 - protein, 13 aa, BK virus
QRMDLRNQQSVHS

SEQ ID NO: 31963 - protein, 13 aa, BK virus
RMDLRNQQSVHSG

SEQ ID NO: 31964 - protein, 13 aa, BK virus
MDLRNQQSVHSGE

SEQ ID NO: 31965 - protein, 13 aa, BK virus
DLRNQQSVHSGEF

SEQ ID NO: 31966 - protein, 13 aa, BK virus
LRNQQSVHSGEFI

SEQ ID NO: 31967 - protein, 13 aa, BK virus
RNQQSVHSGEFIE

SEQ ID NO: 31968 - protein, 13 aa, BK virus
NQQSVHSGEFIEK

SEQ ID NO: 31969 - protein, 13 aa, BK virus
QQSVHSGEFIEKT

SEQ ID NO: 31970 - protein, 13 aa, BK virus
QSVHSGEFIEKTI

SEQ ID NO: 31971 - protein, 13 aa, BK virus
SVHSGEFIEKTIA

SEQ ID NO: 31972 - protein, 13 aa, BK virus
VHSGEFIEKTIAP

SEQ ID NO: 31973 - protein, 13 aa, BK virus
HSGEFIEKTIAPG

SEQ ID NO: 31974 - protein, 13 aa, BK virus
SGEFIEKTIAPGG

SEQ ID NO: 31975 - protein, 13 aa, BK virus
GEFIEKTIAPGGA

SEQ ID NO: 31976 - protein, 13 aa, BK virus
EFIEKTIAPGGAN

SEQ ID NO: 31977 - protein, 13 aa, BK virus
FIEKTIAPGGANQ

SEQ ID NO: 31978 - protein, 13 aa, BK virus
IEKTIAPGGANQR

SEQ ID NO: 31979 - protein, 13 aa, BK virus
EKTIAPGGANQRT

SEQ ID NO: 31980 - protein, 13 aa, BK virus
KTIAPGGANQRTA

SEQ ID NO: 31981 - protein, 13 aa, BK virus
TIAPGGANQRTAP

SEQ ID NO: 31982 - protein, 13 aa, BK virus
IAPGGANQRTAPQ

SEQ ID NO: 31983 - protein, 13 aa, BK virus
APGGANQRTAPQW

SEQ ID NO: 31984 - protein, 13 aa, BK virus
PGGANQRTAPQWM

SEQ ID NO: 31985 - protein, 13 aa, BK virus
GGANQRTAPQWML

SEQ ID NO: 31986 - protein, 13 aa, BK virus
GANQRTAPQWMLP

SEQ ID NO: 31987 - protein, 13 aa, BK virus
ANQRTAPQWMLPL

SEQ ID NO: 31988 - protein, 13 aa, BK virus
NQRTAPQWMLPLL

SEQ ID NO: 31989 - protein, 13 aa, BK virus
QRTAPQWMLPLLL

SEQ ID NO: 31990 - protein, 13 aa, BK virus
RTAPQWMLPLLLG

SEQ ID NO: 31991 - protein, 13 aa, BK virus
TAPQWMLPLLLGL

SEQ ID NO: 31992 - protein, 13 aa, BK virus
APQWMLPLLLGLY

SEQ ID NO: 31993 - protein, 13 aa, BK virus
PQWMLPLLLGLYG

SEQ ID NO: 31994 - protein, 13 aa, BK virus
QWMLPLLLGLYGT

SEQ ID NO: 31995 - protein, 13 aa, BK virus
WMLPLLLGLYGTV

SEQ ID NO: 31996 - protein, 13 aa, BK virus
MLPLLLGLYGTVT

SEQ ID NO: 31997 - protein, 13 aa, BK virus
LPLLLGLYGTVTP

SEQ ID NO: 31998 - protein, 13 aa, BK virus
PLLLGLYGTVTPA

SEQ ID NO: 31999 - protein, 13 aa, BK virus
LLLGLYGTVTPAL

SEQ ID NO: 32000 - protein, 13 aa, BK virus
LLGLYGTVTPALE

SEQ ID NO: 32001 - protein, 13 aa, BK virus
LGLYGTVTPALEA

SEQ ID NO: 32002 - protein, 13 aa, BK virus
GLYGTVTPALEAY

SEQ ID NO: 32003 - protein, 13 aa, BK virus
LYGTVTPALEAYE

SEQ ID NO: 32004 - protein, 13 aa, BK virus
YGTVTPALEAYED

SEQ ID NO: 32005 - protein, 13 aa, BK virus
GTVTPALEAYEDG

SEQ ID NO: 32006 - protein, 13 aa, BK virus
TVTPALEAYEDGP

SEQ ID NO: 32007 - protein, 13 aa, BK virus
VTPALEAYEDGPN

SEQ ID NO: 32008 - protein, 13 aa, BK virus
TPALEAYEDGPNQ

SEQ ID NO: 32009 - protein, 13 aa, BK virus
PALEAYEDGPNQK

SEQ ID NO: 32010 - protein, 13 aa, BK virus
ALEAYEDGPNQKK

SEQ ID NO: 32011 - protein, 13 aa, BK virus
LEAYEDGPNQKKR

SEQ ID NO: 32012 - protein, 13 aa, BK virus
EAYEDGPNQKKRR

SEQ ID NO: 32013 - protein, 13 aa, BK virus
AYEDGPNQKKRRV

SEQ ID NO: 32014 - protein, 13 aa, BK virus
YEDGPNQKKRRVS

SEQ ID NO: 32015 - protein, 13 aa, BK virus
EDGPNQKKRRVSR

SEQ ID NO: 32016 - protein, 13 aa, BK virus
DGPNQKKRRVSRG

SEQ ID NO: 32017 - protein, 13 aa, BK virus
GPNQKKRRVSRGS

SEQ ID NO: 32018 - protein, 13 aa, BK virus
PNQKKRRVSRGSS

SEQ ID NO: 32019 - protein, 13 aa, BK virus
NQKKRRVSRGSSQ

SEQ ID NO: 32020 - protein, 13 aa, BK virus
QKKRRVSRGSSQK

SEQ ID NO: 32021 - protein, 13 aa, BK virus
KKRRVSRGSSQKA

SEQ ID NO: 32022 - protein, 13 aa, BK virus
KRRVSRGSSQKAK

SEQ ID NO: 32023 - protein, 13 aa, BK virus
RRVSRGSSQKAKG

SEQ ID NO: 32024 - protein, 13 aa, BK virus
RVSRGSSQKAKGT

SEQ ID NO: 32025 - protein, 13 aa, BK virus
VSRGSSQKAKGTR

SEQ ID NO: 32026 - protein, 13 aa, BK virus
SRGSSQKAKGTRA

SEQ ID NO: 32027 - protein, 13 aa, BK virus
RGSSQKAKGTRAS

SEQ ID NO: 32028 - protein, 13 aa, BK virus
GSSQKAKGTRASA

SEQ ID NO: 32029 - protein, 13 aa, BK virus
SSQKAKGTRASAK

SEQ ID NO: 32030 - protein, 13 aa, BK virus
SQKAKGTRASAKT

SEQ ID NO: 32031 - protein, 13 aa, BK virus
QKAKGTRASAKTT

SEQ ID NO: 32032 - protein, 13 aa, BK virus
KAKGTRASAKTTN

SEQ ID NO: 32033 - protein, 13 aa, BK virus
AKGTRASAKTTNK

SEQ ID NO: 32034 - protein, 13 aa, BK virus
KGTRASAKTTNKR

SEQ ID NO: 32035 - protein, 13 aa, BK virus
GTRASAKTTNKRR

SEQ ID NO: 32036 - protein, 13 aa, BK virus
TRASAKTTNKRRS

SEQ ID NO: 32037 - protein, 13 aa, BK virus
RASAKTTNKRRSR

SEQ ID NO: 32038 - protein, 13 aa, BK virus
ASAKTTNKRRSRS

SEQ ID NO: 32039 - protein, 13 aa, BK virus
SAKTTNKRRSRSS

SEQ ID NO: 32040 - protein, 13 aa, BK virus
AKTTNKRRSRSSR

SEQ ID NO: 32041 - protein, 13 aa, BK virus
KTTNKRRSRSSRS

SEQ ID NO: 32042 - protein, 13 aa, BK virus
NWGRCYYRGRMLP

SEQ ID NO: 32043 - protein, 13 aa, BK virus
WGRCYYRGRMLPK

SEQ ID NO: 32044 - protein, 13 aa, BK virus
GRCYYRGRMLPKP

SEQ ID NO: 32045 - protein, 13 aa, BK virus
RCYYRGRMLPKPR

SEQ ID NO: 32046 - protein, 13 aa, BK virus
CYYRGRMLPKPRN

SEQ ID NO: 32047 - protein, 13 aa, BK virus
YYRGRMLPKPRNG

SEQ ID NO: 32048 - protein, 13 aa, BK virus
YRGRMLPKPRNGG

SEQ ID NO: 32049 - protein, 13 aa, BK virus
RGRMLPKPRNGGS

SEQ ID NO: 32050 - protein, 13 aa, BK virus
GRMLPKPRNGGSR

SEQ ID NO: 32051 - protein, 13 aa, BK virus
PREKNASLLQHSK

SEQ ID NO: 32052 - protein, 13 aa, BK virus
REKNASLLQHSKN

SEQ ID NO: 32053 - protein, 13 aa, BK virus
EKNASLLQHSKNS

SEQ ID NO: 32054 - protein, 13 aa, BK virus
KNASLLQHSKNSP

SEQ ID NO: 32055 - protein, 13 aa, BK virus
NASLLQHSKNSPP

SEQ ID NO: 32056 - protein, 13 aa, BK virus
ASLLQHSKNSPPQ

SEQ ID NO: 32057 - protein, 13 aa, BK virus
SLLQHSKNSPPQF

SEQ ID NO: 32058 - protein, 13 aa, BK virus
LLQHSKNSPPQFK

SEQ ID NO: 32059 - protein, 13 aa, BK virus
GPNLWKSTDVGGC

SEQ ID NO: 32060 - protein, 13 aa, BK virus
PNLWKSTDVGGCN

SEQ ID NO: 32061 - protein, 13 aa, BK virus
NLWKSTDVGGCNC

SEQ ID NO: 32062 - protein, 13 aa, BK virus
LWKSTDVGGCNCT

SEQ ID NO: 32063 - protein, 13 aa, BK virus
WKSTDVGGCNCTN

SEQ ID NO: 32064 - protein, 13 aa, BK virus
KSTDVGGCNCTNR

SEQ ID NO: 32065 - protein, 13 aa, BK virus
STDVGGCNCTNRG

SEQ ID NO: 32066 - protein, 13 aa, BK virus
TDVGGCNCTNRGY

SEQ ID NO: 32067 - protein, 13 aa, BK virus
DVGGCNCTNRGYW

SEQ ID NO: 32068 - protein, 13 aa, BK virus
VGGCNCTNRGYWN

SEQ ID NO: 32069 - protein, 13 aa, BK virus
GGCNCTNRGYWNN

SEQ ID NO: 32070 - protein, 13 aa, BK virus
FPLLCCRWRTLGN

SEQ ID NO: 32071 - protein, 13 aa, BK virus
PLLCCRWRTLGNA

SEQ ID NO: 32072 - protein, 13 aa, BK virus
LLCCRWRTLGNAG

SEQ ID NO: 32073 - protein, 13 aa, BK virus
LCCRWRTLGNAGS

SEQ ID NO: 32074 - protein, 13 aa, BK virus
CCRWRTLGNAGSA

SEQ ID NO: 32075 - protein, 13 aa, BK virus
CRWRTLGNAGSAN

SEQ ID NO: 32076 - protein, 13 aa, BK virus
RWRTLGNAGSANE

SEQ ID NO: 32077 - protein, 13 aa, BK virus
WRTLGNAGSANEL

SEQ ID NO: 32078 - protein, 13 aa, BK virus
RTLGNAGSANELQ

SEQ ID NO: 32079 - protein, 13 aa, BK virus
TLGNAGSANELQV

SEQ ID NO: 32080 - protein, 13 aa, BK virus
LGNAGSANELQVK

SEQ ID NO: 32081 - protein, 13 aa, BK virus
GNAGSANELQVKV

SEQ ID NO: 32082 - protein, 13 aa, BK virus
NAGSANELQVKVP

SEQ ID NO: 32083 - protein, 13 aa, BK virus
VFWDFHRRGKCSP

SEQ ID NO: 32084 - protein, 13 aa, BK virus
FWDFHRRGKCSPS

SEQ ID NO: 32085 - protein, 13 aa, BK virus
WDFHRRGKCSPST

SEQ ID NO: 32086 - protein, 13 aa, BK virus
DFHRRGKCSPSTS

SEQ ID NO: 32087 - protein, 13 aa, BK virus
FHRRGKCSPSTSC

SEQ ID NO: 32088 - protein, 13 aa, BK virus
HRRGKCSPSTSCD

SEQ ID NO: 32089 - protein, 13 aa, BK virus
RRGKCSPSTSCDQ

SEQ ID NO: 32090 - protein, 13 aa, BK virus
RGKCSPSTSCDQH

SEQ ID NO: 32091 - protein, 13 aa, BK virus
GKCSPSTSCDQHS

SEQ ID NO: 32092 - protein, 13 aa, BK virus
KCSPSTSCDQHSY

SEQ ID NO: 32093 - protein, 13 aa, BK virus
CSPSTSCDQHSYH

SEQ ID NO: 32094 - protein, 13 aa, BK virus
SPSTSCDQHSYHS

SEQ ID NO: 32095 - protein, 13 aa, BK virus
PSTSCDQHSYHSV

SEQ ID NO: 32096 - protein, 13 aa, BK virus
STSCDQHSYHSVA

SEQ ID NO: 32097 - protein, 13 aa, BK virus
TSCDQHSYHSVAR

SEQ ID NO: 32098 - protein, 13 aa, BK virus
QLWNTTVERPCKI

SEQ ID NO: 32099 - protein, 13 aa, BK virus
LWNTTVERPCKIF

SEQ ID NO: 32100 - protein, 13 aa, BK virus
DPPEKKICKESLP

SEQ ID NO: 32101 - protein, 13 aa, BK virus
PPEKKICKESLPN

SEQ ID NO: 32102 - protein, 13 aa, BK virus
PEKKICKESLPNF

SEQ ID NO: 32103 - protein, 13 aa, BK virus
EKKICKESLPNFL

SEQ ID NO: 32104 - protein, 13 aa, BK virus
KKICKESLPNFLF

SEQ ID NO: 32105 - protein, 13 aa, BK virus
KICKESLPNFLFA

SEQ ID NO: 32106 - protein, 13 aa, BK virus
ICKESLPNFLFAK

SEQ ID NO: 32107 - protein, 13 aa, BK virus
PYKQENPESGWAA

SEQ ID NO: 32108 - protein, 13 aa, BK virus
YKQENPESGWAAY

SEQ ID NO: 32109 - protein, 13 aa, BK virus
KQENPESGWAAYV

SEQ ID NO: 32110 - protein, 13 aa, BK virus
QENPESGWAAYVW

SEQ ID NO: 32111 - protein, 13 aa, BK virus
ENPESGWAAYVWY

SEQ ID NO: 32112 - protein, 13 aa, BK virus
NPESGWAAYVWYG

SEQ ID NO: 32113 - protein, 13 aa, BK virus
PESGWAAYVWYGI

SEQ ID NO: 32114 - protein, 13 aa, BK virus
ESGWAAYVWYGIP

SEQ ID NO: 32115 - protein, 13 aa, BK virus
SGWAAYVWYGIPG

SEQ ID NO: 32116 - protein, 13 aa, BK virus
GWAAYVWYGIPGR

SEQ ID NO: 32117 - protein, 13 aa, BK virus
WAAYVWYGIPGRR

SEQ ID NO: 32118 - protein, 13 aa, BK virus
AAYVWYGIPGRRG

SEQ ID NO: 32119 - protein, 13 aa, BK virus
WHRKTSRGPRYDK

SEQ ID NO: 32120 - protein, 13 aa, BK virus
HRKTSRGPRYDKI

SEQ ID NO: 32121 - protein, 13 aa, BK virus
RKTSRGPRYDKIY

SEQ ID NO: 32122 - protein, 13 aa, BK virus
QTGTIANQNALNR

SEQ ID NO: 32123 - protein, 13 aa, BK virus
TGTIANQNALNRC

SEQ ID NO: 32124 - protein, 13 aa, BK virus
GTIANQNALNRCF

SEQ ID NO: 32125 - protein, 13 aa, BK virus
TIANQNALNRCFY

SEQ ID NO: 32126 - protein, 13 aa, BK virus
IANQNALNRCFYC

SEQ ID NO: 32127 - protein, 13 aa, BK virus
ANQNALNRCFYCT

SEQ ID NO: 32128 - protein, 13 aa, BK virus
NQNALNRCFYCTY

SEQ ID NO: 32129 - protein, 13 aa, BK virus
QNALNRCFYCTYT

SEQ ID NO: 32130 - protein, 13 aa, BK virus
NALNRCFYCTYTF

SEQ ID NO: 32131 - protein, 13 aa, BK virus
ALNRCFYCTYTFN

SEQ ID NO: 32132 - protein, 13 aa, BK virus
LNRCFYCTYTFNK

SEQ ID NO: 32133 - protein, 13 aa, BK virus
NRCFYCTYTFNKC

SEQ ID NO: 32134 - protein, 13 aa, BK virus
RCFYCTYTFNKCC

SEQ ID NO: 32135 - protein, 13 aa, BK virus
CFYCTYTFNKCCF

SEQ ID NO: 32136 - protein, 13 aa, BK virus
FYCTYTFNKCCFC

SEQ ID NO: 32137 - protein, 13 aa, BK virus
YCTYTFNKCCFCI

SEQ ID NO: 32138 - protein, 13 aa, BK virus
CTYTFNKCCFCIS

SEQ ID NO: 32139 - protein, 13 aa, BK virus
TYTFNKCCFCISH

SEQ ID NO: 32140 - protein, 13 aa, BK virus
YTFNKCCFCISHF

SEQ ID NO: 32141 - protein, 13 aa, BK virus
NTESLYTNATLDY

SEQ ID NO: 32142 - protein, 13 aa, BK virus
TESLYTNATLDYG

SEQ ID NO: 32143 - protein, 13 aa, BK virus
ESLYTNATLDYGG

SEQ ID NO: 32144 - protein, 13 aa, BK virus
SLYTNATLDYGGL

SEQ ID NO: 32145 - protein, 13 aa, BK virus
LYTNATLDYGGLT

SEQ ID NO: 32146 - protein, 13 aa, BK virus
YTNATLDYGGLTF

SEQ ID NO: 32147 - protein, 13 aa, BK virus
TNATLDYGGLTFG

SEQ ID NO: 32148 - protein, 13 aa, BK virus
NATLDYGGLTFGN

SEQ ID NO: 32149 - protein, 13 aa, BK virus
ATLDYGGLTFGNL

SEQ ID NO: 32150 - protein, 13 aa, BK virus
TLDYGGLTFGNLQ

SEQ ID NO: 32151 - protein, 13 aa, BK virus
LDYGGLTFGNLQQ

SEQ ID NO: 32152 - protein, 13 aa, BK virus
DYGGLTFGNLQQG

SEQ ID NO: 32153 - protein, 13 aa, BK virus
YGGLTFGNLQQGL

SEQ ID NO: 32154 - protein, 13 aa, BK virus
GGLTFGNLQQGLK

SEQ ID NO: 32155 - protein, 13 aa, BK virus
GLTFGNLQQGLKY

SEQ ID NO: 32156 - protein, 13 aa, BK virus
LTFGNLQQGLKYL

SEQ ID NO: 32157 - protein, 13 aa, BK virus
TFGNLQQGLKYLR

SEQ ID NO: 32158 - protein, 13 aa, BK virus
FGNLQQGLKYLRL

SEQ ID NO: 32159 - protein, 13 aa, BK virus
GNLQQGLKYLRLG

SEQ ID NO: 32160 - protein, 13 aa, BK virus
NLQQGLKYLRLGK

SEQ ID NO: 32161 - protein, 13 aa, BK virus
LQQGLKYLRLGKS

SEQ ID NO: 32162 - protein, 13 aa, BK virus
QQGLKYLRLGKSI

SEQ ID NO: 32163 - protein, 13 aa, BK virus
QGLKYLRLGKSIV

SEQ ID NO: 32164 - protein, 13 aa, BK virus
GLKYLRLGKSIVI

SEQ ID NO: 32165 - protein, 13 aa, BK virus
LKYLRLGKSIVIG

SEQ ID NO: 32166 - protein, 13 aa, BK virus
KYLRLGKSIVIGI

SEQ ID NO: 32167 - protein, 13 aa, BK virus
YLRLGKSIVIGIQ

SEQ ID NO: 32168 - protein, 13 aa, BK virus
LRLGKSIVIGIQC

SEQ ID NO: 32169 - protein, 13 aa, BK virus
RLGKSIVIGIQCL

SEQ ID NO: 32170 - protein, 13 aa, BK virus
LGKSIVIGIQCLI

SEQ ID NO: 32171 - protein, 13 aa, BK virus
GKSIVIGIQCLIH

SEQ ID NO: 32172 - protein, 13 aa, BK virus
KSIVIGIQCLIHV

SEQ ID NO: 32173 - protein, 13 aa, BK virus
SIVIGIQCLIHVQ

SEQ ID NO: 32174 - protein, 13 aa, BK virus
IVIGIQCLIHVQS

SEQ ID NO: 32175 - protein, 13 aa, BK virus
VIGIQCLIHVQSL

SEQ ID NO: 32176 - protein, 13 aa, BK virus
IGIQCLIHVQSLQ

SEQ ID NO: 32177 - protein, 13 aa, BK virus
GIQCLIHVQSLQF

SEQ ID NO: 32178 - protein, 13 aa, BK virus
IQCLIHVQSLQFL

SEQ ID NO: 32179 - protein, 13 aa, BK virus
QCLIHVQSLQFLN

SEQ ID NO: 32180 - protein, 13 aa, BK virus
CLIHVQSLQFLNP

SEQ ID NO: 32181 - protein, 13 aa, BK virus
LIHVQSLQFLNPL

SEQ ID NO: 32182 - protein, 13 aa, BK virus
IHVQSLQFLNPLL

SEQ ID NO: 32183 - protein, 13 aa, BK virus
HVQSLQFLNPLLL

SEQ ID NO: 32184 - protein, 13 aa, BK virus
YQEYISPCIYYIS

SEQ ID NO: 32185 - protein, 13 aa, BK virus
QEYISPCIYYISS

SEQ ID NO: 32186 - protein, 13 aa, BK virus
EYISPCIYYISSL

SEQ ID NO: 32187 - protein, 13 aa, BK virus
YISPCIYYISSLK

SEQ ID NO: 32188 - protein, 13 aa, BK virus
ISPCIYYISSLKK

SEQ ID NO: 32189 - protein, 13 aa, BK virus
SPCIYYISSLKKY

SEQ ID NO: 32190 - protein, 13 aa, BK virus
PCIYYISSLKKYT

SEQ ID NO: 32191 - protein, 13 aa, BK virus
CIYYISSLKKYTY

SEQ ID NO: 32192 - protein, 13 aa, BK virus
IYYISSLKKYTYL

SEQ ID NO: 32193 - protein, 13 aa, BK virus
YYISSLKKYTYLS

SEQ ID NO: 32194 - protein, 13 aa, BK virus
YISSLKKYTYLSQ

SEQ ID NO: 32195 - protein, 13 aa, BK virus
ISSLKKYTYLSQN

SEQ ID NO: 32196 - protein, 13 aa, BK virus
SSLKKYTYLSQNP

SEQ ID NO: 32197 - protein, 13 aa, BK virus
SLKKYTYLSQNPA

SEQ ID NO: 32198 - protein, 13 aa, BK virus
LKKYTYLSQNPAF

SEQ ID NO: 32199 - protein, 13 aa, BK virus
KKYTYLSQNPAFP

SEQ ID NO: 32200 - protein, 13 aa, BK virus
KYTYLSQNPAFPS

SEQ ID NO: 32201 - protein, 13 aa, BK virus
YTYLSQNPAFPSI

SEQ ID NO: 32202 - protein, 13 aa, BK virus
TYLSQNPAFPSIQ

SEQ ID NO: 32203 - protein, 13 aa, BK virus
YLSQNPAFPSIQQ

SEQ ID NO: 32204 - protein, 13 aa, BK virus
LSQNPAFPSIQQF

SEQ ID NO: 32205 - protein, 13 aa, BK virus
TKLAVATRSFHFV

SEQ ID NO: 32206 - protein, 13 aa, BK virus
KLAVATRSFHFVK

SEQ ID NO: 32207 - protein, 13 aa, BK virus
LAVATRSFHFVKF

SEQ ID NO: 32208 - protein, 13 aa, BK virus
AVATRSFHFVKFF

SEQ ID NO: 32209 - protein, 13 aa, BK virus
VATRSFHFVKFFF

SEQ ID NO: 32210 - protein, 13 aa, BK virus
ATRSFHFVKFFFQ

SEQ ID NO: 32211 - protein, 13 aa, BK virus
TRSFHFVKFFFQV

SEQ ID NO: 32212 - protein, 13 aa, BK virus
RSFHFVKFFFQVR

SEQ ID NO: 32213 - protein, 13 aa, BK virus
SFHFVKFFFQVRT

SEQ ID NO: 32214 - protein, 13 aa, BK virus
FHFVKFFFQVRTL

SEQ ID NO: 32215 - protein, 13 aa, BK virus
HFVKFFFQVRTLS

SEQ ID NO: 32216 - protein, 13 aa, BK virus
FVKFFFQVRTLSF

SEQ ID NO: 32217 - protein, 13 aa, BK virus
VKFFFQVRTLSFV

SEQ ID NO: 32218 - protein, 13 aa, BK virus
KFFFQVRTLSFVR

SEQ ID NO: 32219 - protein, 13 aa, BK virus
FFFQVRTLSFVRI

SEQ ID NO: 32220 - protein, 13 aa, BK virus
FFQVRTLSFVRIF

SEQ ID NO: 32221 - protein, 13 aa, BK virus
FQVRTLSFVRIFL

SEQ ID NO: 32222 - protein, 13 aa, BK virus
QVRTLSFVRIFLN

SEQ ID NO: 32223 - protein, 13 aa, BK virus
VRTLSFVRIFLNI

SEQ ID NO: 32224 - protein, 13 aa, BK virus
RTLSFVRIFLNIF

SEQ ID NO: 32225 - protein, 13 aa, BK virus
TLSFVRIFLNIFW

SEQ ID NO: 32226 - protein, 13 aa, BK virus
LSFVRIFLNIFWA

SEQ ID NO: 32227 - protein, 13 aa, BK virus
PSLVEIFGFFCLN

SEQ ID NO: 32228 - protein, 13 aa, BK virus
SLVEIFGFFCLNV

SEQ ID NO: 32229 - protein, 13 aa, BK virus
LVEIFGFFCLNVS

SEQ ID NO: 32230 - protein, 13 aa, BK virus
VEIFGFFCLNVSF

SEQ ID NO: 32231 - protein, 13 aa, BK virus
EIFGFFCLNVSFL

SEQ ID NO: 32232 - protein, 13 aa, BK virus
IFGFFCLNVSFLN

SEQ ID NO: 32233 - protein, 13 aa, BK virus
FGFFCLNVSFLNL

SEQ ID NO: 32234 - protein, 13 aa, BK virus
GFFCLNVSFLNLP

SEQ ID NO: 32235 - protein, 13 aa, BK virus
HFHLNNLSNCLNC

SEQ ID NO: 32236 - protein, 13 aa, BK virus
FHLNNLSNCLNCL

SEQ ID NO: 32237 - protein, 13 aa, BK virus
HLNNLSNCLNCLF

SEQ ID NO: 32238 - protein, 13 aa, BK virus
LNNLSNCLNCLFH

SEQ ID NO: 32239 - protein, 13 aa, BK virus
NNLSNCLNCLFHV

SEQ ID NO: 32240 - protein, 13 aa, BK virus
NLSNCLNCLFHVL

SEQ ID NO: 32241 - protein, 13 aa, BK virus
LSNCLNCLFHVLK

SEQ ID NO: 32242 - protein, 13 aa, BK virus
SNCLNCLFHVLKA

SEQ ID NO: 32243 - protein, 13 aa, BK virus
NCLNCLFHVLKAN

SEQ ID NO: 32244 - protein, 13 aa, BK virus
CLNCLFHVLKANP

SEQ ID NO: 32245 - protein, 13 aa, BK virus
LNCLFHVLKANPL

SEQ ID NO: 32246 - protein, 13 aa, BK virus
NCLFHVLKANPLI

SEQ ID NO: 32247 - protein, 13 aa, BK virus
CLFHVLKANPLIQ

SEQ ID NO: 32248 - protein, 13 aa, BK virus
LFHVLKANPLIQL

SEQ ID NO: 32249 - protein, 13 aa, BK virus
FHVLKANPLIQLL

SEQ ID NO: 32250 - protein, 13 aa, BK virus
HVLKANPLIQLLS

SEQ ID NO: 32251 - protein, 13 aa, BK virus
VLKANPLIQLLSL

SEQ ID NO: 32252 - protein, 13 aa, BK virus
LKANPLIQLLSLL

SEQ ID NO: 32253 - protein, 13 aa, BK virus
KANPLIQLLSLLH

SEQ ID NO: 32254 - protein, 13 aa, BK virus
ANPLIQLLSLLHL

SEQ ID NO: 32255 - protein, 13 aa, BK virus
NPLIQLLSLLHLQ

SEQ ID NO: 32256 - protein, 13 aa, BK virus
PLIQLLSLLHLQK

SEQ ID NO: 32257 - protein, 13 aa, BK virus
LIQLLSLLHLQKQ

SEQ ID NO: 32258 - protein, 13 aa, BK virus
IQLLSLLHLQKQP

SEQ ID NO: 32259 - protein, 13 aa, BK virus
QLLSLLHLQKQPC

SEQ ID NO: 32260 - protein, 13 aa, BK virus
LLSLLHLQKQPCT

SEQ ID NO: 32261 - protein, 13 aa, BK virus
LSLLHLQKQPCTD

SEQ ID NO: 32262 - protein, 13 aa, BK virus
SLLHLQKQPCTDL

SEQ ID NO: 32263 - protein, 13 aa, BK virus
LHLAQRLAFPWVG

SEQ ID NO: 32264 - protein, 13 aa, BK virus
HLAQRLAFPWVGL

SEQ ID NO: 32265 - protein, 13 aa, BK virus
LAQRLAFPWVGLH

SEQ ID NO: 32266 - protein, 13 aa, BK virus
AQRLAFPWVGLHL

SEQ ID NO: 32267 - protein, 13 aa, BK virus
QRLAFPWVGLHLR

SEQ ID NO: 32268 - protein, 13 aa, BK virus
RLAFPWVGLHLRL

SEQ ID NO: 32269 - protein, 13 aa, BK virus
LAFPWVGLHLRLY

SEQ ID NO: 32270 - protein, 13 aa, BK virus
AFPWVGLHLRLYH

SEQ ID NO: 32271 - protein, 13 aa, BK virus
FPWVGLHLRLYHH

SEQ ID NO: 32272 - protein, 13 aa, BK virus
PWVGLHLRLYHHT

SEQ ID NO: 32273 - protein, 13 aa, BK virus
WVGLHLRLYHHTN

SEQ ID NO: 32274 - protein, 13 aa, BK virus
VGLHLRLYHHTNL

SEQ ID NO: 32275 - protein, 13 aa, BK virus
GLHLRLYHHTNLI

SEQ ID NO: 32276 - protein, 13 aa, BK virus
LHLRLYHHTNLIT

SEQ ID NO: 32277 - protein, 13 aa, BK virus
HLRLYHHTNLITL

SEQ ID NO: 32278 - protein, 13 aa, BK virus
LRLYHHTNLITLQ

SEQ ID NO: 32279 - protein, 13 aa, BK virus
RLYHHTNLITLQL

SEQ ID NO: 32280 - protein, 13 aa, BK virus
LYHHTNLITLQLV

SEQ ID NO: 32281 - protein, 13 aa, BK virus
YHHTNLITLQLVL

SEQ ID NO: 32282 - protein, 13 aa, BK virus
HHTNLITLQLVLF

SEQ ID NO: 32283 - protein, 13 aa, BK virus
HTNLITLQLVLFF

SEQ ID NO: 32284 - protein, 13 aa, BK virus
TNLITLQLVLFFH

SEQ ID NO: 32285 - protein, 13 aa, BK virus
NLITLQLVLFFHY

SEQ ID NO: 32286 - protein, 13 aa, BK virus
LITLQLVLFFHYQ

SEQ ID NO: 32287 - protein, 13 aa, BK virus
ITLQLVLFFHYQW

SEQ ID NO: 32288 - protein, 13 aa, BK virus
TLQLVLFFHYQWD

SEQ ID NO: 32289 - protein, 13 aa, BK virus
LQLVLFFHYQWDL

SEQ ID NO: 32290 - protein, 13 aa, BK virus
KQYSAKNQILQNP

SEQ ID NO: 32291 - protein, 13 aa, BK virus
QYSAKNQILQNPF

SEQ ID NO: 32292 - protein, 13 aa, BK virus
VANSAAKQHLPYI

SEQ ID NO: 32293 - protein, 13 aa, BK virus
ANSAAKQHLPYIV

SEQ ID NO: 32294 - protein, 13 aa, BK virus
NSAAKQHLPYIVL

SEQ ID NO: 32295 - protein, 13 aa, BK virus
SAAKQHLPYIVLV

SEQ ID NO: 32296 - protein, 13 aa, BK virus
AAKQHLPYIVLVQ

SEQ ID NO: 32297 - protein, 13 aa, BK virus
AKQHLPYIVLVQH

SEQ ID NO: 32298 - protein, 13 aa, BK virus
KQHLPYIVLVQHF

SEQ ID NO: 32299 - protein, 13 aa, BK virus
QHLPYIVLVQHFH

SEQ ID NO: 32300 - protein, 13 aa, BK virus
HLPYIVLVQHFHE

SEQ ID NO: 32301 - protein, 13 aa, BK virus
LPYIVLVQHFHEL

SEQ ID NO: 32302 - protein, 13 aa, BK virus
PYIVLVQHFHELQ

SEQ ID NO: 32303 - protein, 13 aa, BK virus
YIVLVQHFHELQI

SEQ ID NO: 32304 - protein, 13 aa, BK virus
IVLVQHFHELQIL

SEQ ID NO: 32305 - protein, 13 aa, BK virus
VLVQHFHELQILN

SEQ ID NO: 32306 - protein, 13 aa, BK virus
LVQHFHELQILNP

SEQ ID NO: 32307 - protein, 13 aa, BK virus
VQHFHELQILNPF

SEQ ID NO: 32308 - protein, 13 aa, BK virus
QHFHELQILNPFY

SEQ ID NO: 32309 - protein, 13 aa, BK virus
HFHELQILNPFYL

SEQ ID NO: 32310 - protein, 13 aa, BK virus
FHELQILNPFYLI

SEQ ID NO: 32311 - protein, 13 aa, BK virus
HELQILNPFYLIY

SEQ ID NO: 32312 - protein, 13 aa, BK virus
ELQILNPFYLIYD

SEQ ID NO: 32313 - protein, 13 aa, BK virus
IFLLAFLPWSYEG

SEQ ID NO: 32314 - protein, 13 aa, BK virus
FLLAFLPWSYEGY

SEQ ID NO: 32315 - protein, 13 aa, BK virus
LLAFLPWSYEGYL

SEQ ID NO: 32316 - protein, 13 aa, BK virus
LAFLPWSYEGYLL

SEQ ID NO: 32317 - protein, 13 aa, BK virus
AFLPWSYEGYLLF

SEQ ID NO: 32318 - protein, 13 aa, BK virus
FLPWSYEGYLLFF

SEQ ID NO: 32319 - protein, 13 aa, BK virus
LKLYLLLADKYFF

SEQ ID NO: 32320 - protein, 13 aa, BK virus
KLYLLLADKYFFD

SEQ ID NO: 32321 - protein, 13 aa, BK virus
LYLLLADKYFFDF

SEQ ID NO: 32322 - protein, 13 aa, BK virus
YLLLADKYFFDFY

SEQ ID NO: 32323 - protein, 13 aa, BK virus
LLLADKYFFDFYF

SEQ ID NO: 32324 - protein, 13 aa, BK virus
LLADKYFFDFYFL

SEQ ID NO: 32325 - protein, 13 aa, BK virus
LADKYFFDFYFLQ

SEQ ID NO: 32326 - protein, 13 aa, BK virus
ADKYFFDFYFLQK

SEQ ID NO: 32327 - protein, 13 aa, BK virus
SDKAGLFSDTFYT

SEQ ID NO: 32328 - protein, 13 aa, BK virus
DKAGLFSDTFYTP

SEQ ID NO: 32329 - protein, 13 aa, BK virus
KAGLFSDTFYTPL

SEQ ID NO: 32330 - protein, 13 aa, BK virus
AGLFSDTFYTPLH

SEQ ID NO: 32331 - protein, 13 aa, BK virus
GLFSDTFYTPLHC

SEQ ID NO: 32332 - protein, 13 aa, BK virus
LFSDTFYTPLHCI

SEQ ID NO: 32333 - protein, 13 aa, BK virus
FSDTFYTPLHCIE

SEQ ID NO: 32334 - protein, 13 aa, BK virus
SDTFYTPLHCIEI

SEQ ID NO: 32335 - protein, 13 aa, BK virus
DTFYTPLHCIEIL

SEQ ID NO: 32336 - protein, 13 aa, BK virus
TFYTPLHCIEILN

SEQ ID NO: 32337 - protein, 13 aa, BK virus
FYTPLHCIEILNT

SEQ ID NO: 32338 - protein, 13 aa, BK virus
YTPLHCIEILNTY

SEQ ID NO: 32339 - protein, 13 aa, BK virus
TPLHCIEILNTYL

SEQ ID NO: 32340 - protein, 13 aa, BK virus
PLHCIEILNTYLI

SEQ ID NO: 32341 - protein, 13 aa, BK virus
LHCIEILNTYLII

SEQ ID NO: 32342 - protein, 13 aa, BK virus
HCIEILNTYLIIK

SEQ ID NO: 32343 - protein, 13 aa, BK virus
CIEILNTYLIIKT

SEQ ID NO: 32344 - protein, 13 aa, BK virus
IEILNTYLIIKTH

SEQ ID NO: 32345 - protein, 13 aa, BK virus
EILNTYLIIKTHP

SEQ ID NO: 32346 - protein, 13 aa, BK virus
ILNTYLIIKTHPH

SEQ ID NO: 32347 - protein, 13 aa, BK virus
LNTYLIIKTHPHT

SEQ ID NO: 32348 - protein, 13 aa, BK virus
NTYLIIKTHPHTL

SEQ ID NO: 32349 - protein, 13 aa, BK virus
TYLIIKTHPHTLS

SEQ ID NO: 32350 - protein, 13 aa, BK virus
YLIIKTHPHTLSL

SEQ ID NO: 32351 - protein, 13 aa, BK virus
LIIKTHPHTLSLL

SEQ ID NO: 32352 - protein, 13 aa, BK virus
IIKTHPHTLSLLH

SEQ ID NO: 32353 - protein, 13 aa, BK virus
IKTHPHTLSLLHT

SEQ ID NO: 32354 - protein, 13 aa, BK virus
KTHPHTLSLLHTQ

SEQ ID NO: 32355 - protein, 13 aa, BK virus
LISKTPALFLQAL

SEQ ID NO: 32356 - protein, 13 aa, BK virus
ISKTPALFLQALL

SEQ ID NO: 32357 - protein, 13 aa, BK virus
SKTPALFLQALLG

SEQ ID NO: 32358 - protein, 13 aa, BK virus
NHAPLSPLECFLL

SEQ ID NO: 32359 - protein, 13 aa, BK virus
LQKLYVYVELKRI

SEQ ID NO: 32360 - protein, 13 aa, BK virus
GLLPFFFFWVVLS

SEQ ID NO: 32361 - protein, 13 aa, BK virus
LLPFFFFWVVLSV

SEQ ID NO: 32362 - protein, 13 aa, BK virus
LPFFFFWVVLSVE

SEQ ID NO: 32363 - protein, 13 aa, BK virus
PFFFFWVVLSVEN

SEQ ID NO: 32364 - protein, 13 aa, BK virus
FFFFWVVLSVENL

SEQ ID NO: 32365 - protein, 13 aa, BK virus
FFFWVVLSVENLL

SEQ ID NO: 32366 - protein, 13 aa, BK virus
FFWVVLSVENLLL

SEQ ID NO: 32367 - protein, 13 aa, BK virus
FWVVLSVENLLLL

SEQ ID NO: 32368 - protein, 13 aa, BK virus
WVVLSVENLLLLL

SEQ ID NO: 32369 - protein, 13 aa, BK virus
VVLSVENLLLLLH

SEQ ID NO: 32370 - protein, 13 aa, BK virus
VLSVENLLLLLHH

SEQ ID NO: 32371 - protein, 13 aa, BK virus
LSVENLLLLLHHW

SEQ ID NO: 32372 - protein, 13 aa, BK virus
SVENLLLLLHHWQ

SEQ ID NO: 32373 - protein, 13 aa, BK virus
VENLLLLLHHWQT

SEQ ID NO: 32374 - protein, 13 aa, BK virus
ENLLLLLHHWQTY

SEQ ID NO: 32375 - protein, 13 aa, BK virus
NLLLLLHHWQTYL

SEQ ID NO: 32376 - protein, 13 aa, BK virus
LLLLLHHWQTYLH

SEQ ID NO: 32377 - protein, 13 aa, BK virus
LLLLHHWQTYLHG

SEQ ID NO: 32378 - protein, 13 aa, BK virus
LLLHHWQTYLHGK

SEQ ID NO: 32379 - protein, 13 aa, BK virus
LLHHWQTYLHGKI

SEQ ID NO: 32380 - protein, 13 aa, BK virus
LHHWQTYLHGKIN

SEQ ID NO: 32381 - protein, 13 aa, BK virus
HHWQTYLHGKINL

SEQ ID NO: 32382 - protein, 13 aa, BK virus
HWQTYLHGKINLH

SEQ ID NO: 32383 - protein, 13 aa, BK virus
WQTYLHGKINLHP

SEQ ID NO: 32384 - protein, 13 aa, BK virus
QTYLHGKINLHPI

SEQ ID NO: 32385 - protein, 13 aa, BK virus
TYLHGKINLHPIF

SEQ ID NO: 32386 - protein, 13 aa, BK virus
YLHGKINLHPIFH

SEQ ID NO: 32387 - protein, 13 aa, BK virus
RNSTRTPTLLFHR

SEQ ID NO: 32388 - protein, 13 aa, BK virus
NSTRTPTLLFHRL

SEQ ID NO: 32389 - protein, 13 aa, BK virus
STRTPTLLFHRLA

SEQ ID NO: 32390 - protein, 13 aa, BK virus
TRTPTLLFHRLAP

SEQ ID NO: 32391 - protein, 13 aa, BK virus
RTPTLLFHRLAPI

SEQ ID NO: 32392 - protein, 13 aa, BK virus
TPTLLFHRLAPIK

SEQ ID NO: 32393 - protein, 13 aa, BK virus
PTLLFHRLAPIKK

SEQ ID NO: 32394 - protein, 13 aa, BK virus
TLLFHRLAPIKKI

SEQ ID NO: 32395 - protein, 13 aa, BK virus
LLFHRLAPIKKII

SEQ ID NO: 32396 - protein, 13 aa, BK virus
LFHRLAPIKKIIT

SEQ ID NO: 32397 - protein, 13 aa, BK virus
GLLIFYYLSKYKL

SEQ ID NO: 32398 - protein, 13 aa, BK virus
LLIFYYLSKYKLV

SEQ ID NO: 32399 - protein, 13 aa, BK virus
LIFYYLSKYKLVT

SEQ ID NO: 32400 - protein, 13 aa, BK virus
IFYYLSKYKLVTL

SEQ ID NO: 32401 - protein, 13 aa, BK virus
FYYLSKYKLVTLK

SEQ ID NO: 32402 - protein, 13 aa, BK virus
YYLSKYKLVTLKL

SEQ ID NO: 32403 - protein, 13 aa, BK virus
ISEGSFSNYLDPP

SEQ ID NO: 32404 - protein, 13 aa, BK virus
SEGSFSNYLDPPL

SEQ ID NO: 32405 - protein, 13 aa, BK virus
EGSFSNYLDPPLQ

SEQ ID NO: 32406 - protein, 13 aa, BK virus
GSFSNYLDPPLQS

SEQ ID NO: 32407 - protein, 13 aa, BK virus
SFSNYLDPPLQSF

SEQ ID NO: 32408 - protein, 13 aa, BK virus
FSNYLDPPLQSFF

SEQ ID NO: 32409 - protein, 13 aa, BK virus
SNYLDPPLQSFFS

SEQ ID NO: 32410 - protein, 13 aa, BK virus
AKPLCEAVNAVAI

SEQ ID NO: 32411 - protein, 13 aa, BK virus
KPLCEAVNAVAIY

SEQ ID NO: 32412 - protein, 13 aa, BK virus
PLCEAVNAVAIYP

SEQ ID NO: 32413 - protein, 13 aa, BK virus
LCEAVNAVAIYPN

SEQ ID NO: 32414 - protein, 13 aa, BK virus
CEAVNAVAIYPNQ

SEQ ID NO: 32415 - protein, 13 aa, BK virus
EAVNAVAIYPNQG

SEQ ID NO: 32416 - protein, 13 aa, BK virus
AVNAVAIYPNQGL

SEQ ID NO: 32417 - protein, 13 aa, BK virus
VNAVAIYPNQGLF

SEQ ID NO: 32418 - protein, 13 aa, BK virus
NAVAIYPNQGLFS

SEQ ID NO: 32419 - protein, 13 aa, BK virus
HARAVHRRLFGTN

SEQ ID NO: 32420 - protein, 13 aa, BK virus
ARAVHRRLFGTNR

SEQ ID NO: 32421 - protein, 13 aa, BK virus
RAVHRRLFGTNRP

SEQ ID NO: 32422 - protein, 13 aa, BK virus
AVHRRLFGTNRPF

SEQ ID NO: 32423 - protein, 13 aa, BK virus
VHRRLFGTNRPFL

SEQ ID NO: 32424 - protein, 13 aa, BK virus
HRRLFGTNRPFLA

SEQ ID NO: 32425 - protein, 13 aa, BK virus
RRLFGTNRPFLAV

SEQ ID NO: 32426 - protein, 13 aa, BK virus
RLFGTNRPFLAVQ

SEQ ID NO: 32427 - protein, 13 aa, BK virus
LFGTNRPFLAVQG

SEQ ID NO: 32428 - protein, 13 aa, BK virus
FGTNRPFLAVQGI

SEQ ID NO: 32429 - protein, 13 aa, BK virus
GTNRPFLAVQGIW

SEQ ID NO: 32430 - protein, 13 aa, BK virus
TNRPFLAVQGIWA

SEQ ID NO: 32431 - protein, 13 aa, BK virus
NRPFLAVQGIWAK

SEQ ID NO: 32432 - protein, 13 aa, BK virus
RPFLAVQGIWAKR

SEQ ID NO: 32433 - protein, 13 aa, BK virus
PFLAVQGIWAKRK

SEQ ID NO: 32434 - protein, 13 aa, BK virus
FLAVQGIWAKRKI

SEQ ID NO: 32435 - protein, 13 aa, BK virus
LAVQGIWAKRKIS

SEQ ID NO: 32436 - protein, 13 aa, BK virus
AVQGIWAKRKIST

SEQ ID NO: 32437 - protein, 13 aa, BK virus
VQGIWAKRKISTN

SEQ ID NO: 32438 - protein, 13 aa, BK virus
QGIWAKRKISTNL

SEQ ID NO: 32439 - protein, 13 aa, BK virus
ATPGSKIRLMSYL

SEQ ID NO: 32440 - protein, 13 aa, BK virus
TPGSKIRLMSYLY

SEQ ID NO: 32441 - protein, 13 aa, BK virus
PGSKIRLMSYLYI

SEQ ID NO: 32442 - protein, 13 aa, BK virus
GSKIRLMSYLYIL

SEQ ID NO: 32443 - protein, 13 aa, BK virus
SKIRLMSYLYILL

SEQ ID NO: 32444 - protein, 13 aa, BK virus
KIRLMSYLYILLH

SEQ ID NO: 32445 - protein, 13 aa, BK virus
IRLMSYLYILLHF

SEQ ID NO: 32446 - protein, 13 aa, BK virus
RLMSYLYILLHFF

SEQ ID NO: 32447 - protein, 13 aa, BK virus
LMSYLYILLHFFI

SEQ ID NO: 32448 - protein, 13 aa, BK virus
MSYLYILLHFFIQ

SEQ ID NO: 32449 - protein, 13 aa, BK virus
SYLYILLHFFIQS

SEQ ID NO: 32450 - protein, 13 aa, BK virus
YLYILLHFFIQSI

SEQ ID NO: 32451 - protein, 13 aa, BK virus
LYILLHFFIQSIH

SEQ ID NO: 32452 - protein, 13 aa, BK virus
YILLHFFIQSIHS

SEQ ID NO: 32453 - protein, 13 aa, BK virus
ILLHFFIQSIHSL

SEQ ID NO: 32454 - protein, 13 aa, BK virus
LLHFFIQSIHSLH

SEQ ID NO: 32455 - protein, 13 aa, BK virus
LHFFIQSIHSLHF

SEQ ID NO: 32456 - protein, 13 aa, BK virus
HFFIQSIHSLHFI

SEQ ID NO: 32457 - protein, 13 aa, BK virus
FFIQSIHSLHFIL

SEQ ID NO: 32458 - protein, 13 aa, BK virus
FIQSIHSLHFILV

SEQ ID NO: 32459 - protein, 13 aa, BK virus
IQSIHSLHFILVA

SEQ ID NO: 32460 - protein, 13 aa, BK virus
QSIHSLHFILVAP

SEQ ID NO: 32461 - protein, 13 aa, BK virus
SIHSLHFILVAPF

SEQ ID NO: 32462 - protein, 13 aa, BK virus
IHSLHFILVAPFV

SEQ ID NO: 32463 - protein, 13 aa, BK virus
HSLHFILVAPFVR

SEQ ID NO: 32464 - protein, 13 aa, BK virus
SLHFILVAPFVRV

SEQ ID NO: 32465 - protein, 13 aa, BK virus
LHFILVAPFVRVK

SEQ ID NO: 32466 - protein, 13 aa, BK virus
HFILVAPFVRVKF

SEQ ID NO: 32467 - protein, 13 aa, BK virus
FILVAPFVRVKFL

SEQ ID NO: 32468 - protein, 13 aa, BK virus
ILVAPFVRVKFLT

SEQ ID NO: 32469 - protein, 14 aa, BK virus
ASEKASTPLLLERK

SEQ ID NO: 32470 - protein, 14 aa, BK virus
SEKASTPLLLERKG

SEQ ID NO: 32471 - protein, 14 aa, BK virus
EKASTPLLLERKGG

SEQ ID NO: 32472 - protein, 14 aa, BK virus
KASTPLLLERKGGG

SEQ ID NO: 32473 - protein, 14 aa, BK virus
ASTPLLLERKGGGR

SEQ ID NO: 32474 - protein, 14 aa, BK virus
STPLLLERKGGGRG

SEQ ID NO: 32475 - protein, 14 aa, BK virus
TPLLLERKGGGRGG

SEQ ID NO: 32476 - protein, 14 aa, BK virus
PLLLERKGGGRGGL

SEQ ID NO: 32477 - protein, 14 aa, BK virus
LLLERKGGGRGGLG

SEQ ID NO: 32478 - protein, 14 aa, BK virus
LLERKGGGRGGLGL

SEQ ID NO: 32479 - protein, 14 aa, BK virus
LERKGGGRGGLGLL

SEQ ID NO: 32480 - protein, 14 aa, BK virus
ERKGGGRGGLGLLY

SEQ ID NO: 32481 - protein, 14 aa, BK virus
RKGGGRGGLGLLYI

SEQ ID NO: 32482 - protein, 14 aa, BK virus
KGGGRGGLGLLYII

SEQ ID NO: 32483 - protein, 14 aa, BK virus
GGGRGGLGLLYIIK

SEQ ID NO: 32484 - protein, 14 aa, BK virus
GGRGGLGLLYIIKK

SEQ ID NO: 32485 - protein, 14 aa, BK virus
GRGGLGLLYIIKKK

SEQ ID NO: 32486 - protein, 14 aa, BK virus
RGGLGLLYIIKKKA

SEQ ID NO: 32487 - protein, 14 aa, BK virus
GGLGLLYIIKKKAT

SEQ ID NO: 32488 - protein, 14 aa, BK virus
GLGLLYIIKKKATG

SEQ ID NO: 32489 - protein, 14 aa, BK virus
LGLLYIIKKKATGR

SEQ ID NO: 32490 - protein, 14 aa, BK virus
GLLYIIKKKATGRS

SEQ ID NO: 32491 - protein, 14 aa, BK virus
LLYIIKKKATGRSC

SEQ ID NO: 32492 - protein, 14 aa, BK virus
LYIIKKKATGRSCL

SEQ ID NO: 32493 - protein, 14 aa, BK virus
YIIKKKATGRSCLP

SEQ ID NO: 32494 - protein, 14 aa, BK virus
IIKKKATGRSCLPM

SEQ ID NO: 32495 - protein, 14 aa, BK virus
IKKKATGRSCLPME

SEQ ID NO: 32496 - protein, 14 aa, BK virus
KKKATGRSCLPMEC

SEQ ID NO: 32497 - protein, 14 aa, BK virus
KKATGRSCLPMECS

SEQ ID NO: 32498 - protein, 14 aa, BK virus
KATGRSCLPMECSQ

SEQ ID NO: 32499 - protein, 14 aa, BK virus
ATGRSCLPMECSQT

SEQ ID NO: 32500 - protein, 14 aa, BK virus
TGRSCLPMECSQTM

SEQ ID NO: 32501 - protein, 14 aa, BK virus
GRSCLPMECSQTMT

SEQ ID NO: 32502 - protein, 14 aa, BK virus
RSCLPMECSQTMTS

SEQ ID NO: 32503 - protein, 14 aa, BK virus
SCLPMECSQTMTSG

SEQ ID NO: 32504 - protein, 14 aa, BK virus
CLPMECSQTMTSGR

SEQ ID NO: 32505 - protein, 14 aa, BK virus
LPMECSQTMTSGRK

SEQ ID NO: 32506 - protein, 14 aa, BK virus
PMECSQTMTSGRKV

SEQ ID NO: 32507 - protein, 14 aa, BK virus
MECSQTMTSGRKVH

SEQ ID NO: 32508 - protein, 14 aa, BK virus
ECSQTMTSGRKVHD

SEQ ID NO: 32509 - protein, 14 aa, BK virus
CSQTMTSGRKVHDS

SEQ ID NO: 32510 - protein, 14 aa, BK virus
SQTMTSGRKVHDSQ

SEQ ID NO: 32511 - protein, 14 aa, BK virus
QTMTSGRKVHDSQG

SEQ ID NO: 32512 - protein, 14 aa, BK virus
TMTSGRKVHDSQGN

SEQ ID NO: 32513 - protein, 14 aa, BK virus
MTSGRKVHDSQGNA

SEQ ID NO: 32514 - protein, 14 aa, BK virus
TSGRKVHDSQGNAA

SEQ ID NO: 32515 - protein, 14 aa, BK virus
SGRKVHDSQGNAAK

SEQ ID NO: 32516 - protein, 14 aa, BK virus
GRKVHDSQGNAAKP

SEQ ID NO: 32517 - protein, 14 aa, BK virus
PQEGKCMTHREELL

SEQ ID NO: 32518 - protein, 14 aa, BK virus
QEGKCMTHREELLT

SEQ ID NO: 32519 - protein, 14 aa, BK virus
EGKCMTHREELLTH

SEQ ID NO: 32520 - protein, 14 aa, BK virus
GKCMTHREELLTHG

SEQ ID NO: 32521 - protein, 14 aa, BK virus
KCMTHREELLTHGM

SEQ ID NO: 32522 - protein, 14 aa, BK virus
CMTHREELLTHGMQ

SEQ ID NO: 32523 - protein, 14 aa, BK virus
MTHREELLTHGMQP

SEQ ID NO: 32524 - protein, 14 aa, BK virus
THREELLTHGMQPN

SEQ ID NO: 32525 - protein, 14 aa, BK virus
HREELLTHGMQPNH

SEQ ID NO: 32526 - protein, 14 aa, BK virus
REELLTHGMQPNHD

SEQ ID NO: 32527 - protein, 14 aa, BK virus
EELLTHGMQPNHDL

SEQ ID NO: 32528 - protein, 14 aa, BK virus
ELLTHGMQPNHDLR

SEQ ID NO: 32529 - protein, 14 aa, BK virus
LLTHGMQPNHDLRK

SEQ ID NO: 32530 - protein, 14 aa, BK virus
LTHGMQPNHDLRKE

SEQ ID NO: 32531 - protein, 14 aa, BK virus
THGMQPNHDLRKES

SEQ ID NO: 32532 - protein, 14 aa, BK virus
HGMQPNHDLRKESA

SEQ ID NO: 32533 - protein, 14 aa, BK virus
QTCFASLGILALSP

SEQ ID NO: 32534 - protein, 14 aa, BK virus
TCFASLGILALSPV

SEQ ID NO: 32535 - protein, 14 aa, BK virus
CFASLGILALSPVK

SEQ ID NO: 32536 - protein, 14 aa, BK virus
FASLGILALSPVKL

SEQ ID NO: 32537 - protein, 14 aa, BK virus
ASLGILALSPVKLD

SEQ ID NO: 32538 - protein, 14 aa, BK virus
SLGILALSPVKLDK

SEQ ID NO: 32539 - protein, 14 aa, BK virus
LGILALSPVKLDKG

SEQ ID NO: 32540 - protein, 14 aa, BK virus
GILALSPVKLDKGH

SEQ ID NO: 32541 - protein, 14 aa, BK virus
ILALSPVKLDKGHG

SEQ ID NO: 32542 - protein, 14 aa, BK virus
LALSPVKLDKGHGS

SEQ ID NO: 32543 - protein, 14 aa, BK virus
ALSPVKLDKGHGSA

SEQ ID NO: 32544 - protein, 14 aa, BK virus
LSPVKLDKGHGSAP

SEQ ID NO: 32545 - protein, 14 aa, BK virus
SPVKLDKGHGSAPA

SEQ ID NO: 32546 - protein, 14 aa, BK virus
PVKLDKGHGSAPAV

SEQ ID NO: 32547 - protein, 14 aa, BK virus
VKLDKGHGSAPAVT

SEQ ID NO: 32548 - protein, 14 aa, BK virus
KLDKGHGSAPAVTT

SEQ ID NO: 32549 - protein, 14 aa, BK virus
LDKGHGSAPAVTTS

SEQ ID NO: 32550 - protein, 14 aa, BK virus
DKGHGSAPAVTTSF

SEQ ID NO: 32551 - protein, 14 aa, BK virus
KGHGSAPAVTTSFS

SEQ ID NO: 32552 - protein, 14 aa, BK virus
GHGSAPAVTTSFSE

SEQ ID NO: 32553 - protein, 14 aa, BK virus
HGSAPAVTTSFSES

SEQ ID NO: 32554 - protein, 14 aa, BK virus
GSAPAVTTSFSESW

SEQ ID NO: 32555 - protein, 14 aa, BK virus
NLDWNKKKSSEDFY

SEQ ID NO: 32556 - protein, 14 aa, BK virus
LDWNKKKSSEDFYF

SEQ ID NO: 32557 - protein, 14 aa, BK virus
DWNKKKSSEDFYFY

SEQ ID NO: 32558 - protein, 14 aa, BK virus
WNKKKSSEDFYFYF

SEQ ID NO: 32559 - protein, 14 aa, BK virus
NKKKSSEDFYFYFR

SEQ ID NO: 32560 - protein, 14 aa, BK virus
KKKSSEDFYFYFRA

SEQ ID NO: 32561 - protein, 14 aa, BK virus
KKSSEDFYFYFRAF

SEQ ID NO: 32562 - protein, 14 aa, BK virus
KSSEDFYFYFRAFA

SEQ ID NO: 32563 - protein, 14 aa, BK virus
SSEDFYFYFRAFAG

SEQ ID NO: 32564 - protein, 14 aa, BK virus
SEDFYFYFRAFAGI

SEQ ID NO: 32565 - protein, 14 aa, BK virus
EDFYFYFRAFAGIL

SEQ ID NO: 32566 - protein, 14 aa, BK virus
RQCRREKQKYHCFT

SEQ ID NO: 32567 - protein, 14 aa, BK virus
QCRREKQKYHCFTC

SEQ ID NO: 32568 - protein, 14 aa, BK virus
CRREKQKYHCFTCC

SEQ ID NO: 32569 - protein, 14 aa, BK virus
RREKQKYHCFTCCK

SEQ ID NO: 32570 - protein, 14 aa, BK virus
REKQKYHCFTCCKR

SEQ ID NO: 32571 - protein, 14 aa, BK virus
EKQKYHCFTCCKRL

SEQ ID NO: 32572 - protein, 14 aa, BK virus
KQKYHCFTCCKRLC

SEQ ID NO: 32573 - protein, 14 aa, BK virus
QKYHCFTCCKRLCK

SEQ ID NO: 32574 - protein, 14 aa, BK virus
KYHCFTCCKRLCKR

SEQ ID NO: 32575 - protein, 14 aa, BK virus
YHCFTCCKRLCKRL

SEQ ID NO: 32576 - protein, 14 aa, BK virus
HCFTCCKRLCKRLL

SEQ ID NO: 32577 - protein, 14 aa, BK virus
CFTCCKRLCKRLLG

SEQ ID NO: 32578 - protein, 14 aa, BK virus
FTCCKRLCKRLLGK

SEQ ID NO: 32579 - protein, 14 aa, BK virus
SLFFCISRFMGAAL

SEQ ID NO: 32580 - protein, 14 aa, BK virus
LFFCISRFMGAALA

SEQ ID NO: 32581 - protein, 14 aa, BK virus
FFCISRFMGAALAL

SEQ ID NO: 32582 - protein, 14 aa, BK virus
FCISRFMGAALALL

SEQ ID NO: 32583 - protein, 14 aa, BK virus
CISRFMGAALALLG

SEQ ID NO: 32584 - protein, 14 aa, BK virus
ISRFMGAALALLGD

SEQ ID NO: 32585 - protein, 14 aa, BK virus
SRFMGAALALLGDL

SEQ ID NO: 32586 - protein, 14 aa, BK virus
RFMGAALALLGDLV

SEQ ID NO: 32587 - protein, 14 aa, BK virus
FMGAALALLGDLVA

SEQ ID NO: 32588 - protein, 14 aa, BK virus
MGAALALLGDLVAS

SEQ ID NO: 32589 - protein, 14 aa, BK virus
GAALALLGDLVASV

SEQ ID NO: 32590 - protein, 14 aa, BK virus
AALALLGDLVASVS

SEQ ID NO: 32591 - protein, 14 aa, BK virus
ALALLGDLVASVSE

SEQ ID NO: 32592 - protein, 14 aa, BK virus
LALLGDLVASVSEA

SEQ ID NO: 32593 - protein, 14 aa, BK virus
ALLGDLVASVSEAA

SEQ ID NO: 32594 - protein, 14 aa, BK virus
LLGDLVASVSEAAA

SEQ ID NO: 32595 - protein, 14 aa, BK virus
LGDLVASVSEAAAA

SEQ ID NO: 32596 - protein, 14 aa, BK virus
GDLVASVSEAAAAT

SEQ ID NO: 32597 - protein, 14 aa, BK virus
DLVASVSEAAAATG

SEQ ID NO: 32598 - protein, 14 aa, BK virus
LVASVSEAAAATGF

SEQ ID NO: 32599 - protein, 14 aa, BK virus
VASVSEAAAATGFS

SEQ ID NO: 32600 - protein, 14 aa, BK virus
ASVSEAAAATGFSV

SEQ ID NO: 32601 - protein, 14 aa, BK virus
SVSEAAAATGFSVA

SEQ ID NO: 32602 - protein, 14 aa, BK virus
VSEAAAATGFSVAE

SEQ ID NO: 32603 - protein, 14 aa, BK virus
SEAAAATGFSVAEI

SEQ ID NO: 32604 - protein, 14 aa, BK virus
EAAAATGFSVAEIA

SEQ ID NO: 32605 - protein, 14 aa, BK virus
AAAATGFSVAEIAA

SEQ ID NO: 32606 - protein, 14 aa, BK virus
AAATGFSVAEIAAG

SEQ ID NO: 32607 - protein, 14 aa, BK virus
AATGFSVAEIAAGE

SEQ ID NO: 32608 - protein, 14 aa, BK virus
ATGFSVAEIAAGEA

SEQ ID NO: 32609 - protein, 14 aa, BK virus
TGFSVAEIAAGEAA

SEQ ID NO: 32610 - protein, 14 aa, BK virus
GFSVAEIAAGEAAA

SEQ ID NO: 32611 - protein, 14 aa, BK virus
FSVAEIAAGEAAAA

SEQ ID NO: 32612 - protein, 14 aa, BK virus
SVAEIAAGEAAAAI

SEQ ID NO: 32613 - protein, 14 aa, BK virus
VAEIAAGEAAAAIE

SEQ ID NO: 32614 - protein, 14 aa, BK virus
AEIAAGEAAAAIEV

SEQ ID NO: 32615 - protein, 14 aa, BK virus
EIAAGEAAAAIEVQ

SEQ ID NO: 32616 - protein, 14 aa, BK virus
IAAGEAAAAIEVQI

SEQ ID NO: 32617 - protein, 14 aa, BK virus
AAGEAAAAIEVQIA

SEQ ID NO: 32618 - protein, 14 aa, BK virus
AGEAAAAIEVQIAS

SEQ ID NO: 32619 - protein, 14 aa, BK virus
GEAAAAIEVQIASL

SEQ ID NO: 32620 - protein, 14 aa, BK virus
EAAAAIEVQIASLA

SEQ ID NO: 32621 - protein, 14 aa, BK virus
AAAAIEVQIASLAT

SEQ ID NO: 32622 - protein, 14 aa, BK virus
AAAIEVQIASLATV

SEQ ID NO: 32623 - protein, 14 aa, BK virus
AAIEVQIASLATVE

SEQ ID NO: 32624 - protein, 14 aa, BK virus
AIEVQIASLATVEG

SEQ ID NO: 32625 - protein, 14 aa, BK virus
IEVQIASLATVEGI

SEQ ID NO: 32626 - protein, 14 aa, BK virus
EVQIASLATVEGIT

SEQ ID NO: 32627 - protein, 14 aa, BK virus
VQIASLATVEGITS

SEQ ID NO: 32628 - protein, 14 aa, BK virus
QIASLATVEGITST

SEQ ID NO: 32629 - protein, 14 aa, BK virus
IASLATVEGITSTS

SEQ ID NO: 32630 - protein, 14 aa, BK virus
ASLATVEGITSTSE

SEQ ID NO: 32631 - protein, 14 aa, BK virus
SLATVEGITSTSEA

SEQ ID NO: 32632 - protein, 14 aa, BK virus
LATVEGITSTSEAI

SEQ ID NO: 32633 - protein, 14 aa, BK virus
ATVEGITSTSEAIA

SEQ ID NO: 32634 - protein, 14 aa, BK virus
TVEGITSTSEAIAA

SEQ ID NO: 32635 - protein, 14 aa, BK virus
VEGITSTSEAIAAI

SEQ ID NO: 32636 - protein, 14 aa, BK virus
EGITSTSEAIAAIG

SEQ ID NO: 32637 - protein, 14 aa, BK virus
GITSTSEAIAAIGL

SEQ ID NO: 32638 - protein, 14 aa, BK virus
ITSTSEAIAAIGLT

SEQ ID NO: 32639 - protein, 14 aa, BK virus
TSTSEAIAAIGLTP

SEQ ID NO: 32640 - protein, 14 aa, BK virus
STSEAIAAIGLTPQ

SEQ ID NO: 32641 - protein, 14 aa, BK virus
TSEAIAAIGLTPQT

SEQ ID NO: 32642 - protein, 14 aa, BK virus
SEAIAAIGLTPQTY

SEQ ID NO: 32643 - protein, 14 aa, BK virus
EAIAAIGLTPQTYA

SEQ ID NO: 32644 - protein, 14 aa, BK virus
AIAAIGLTPQTYAV

SEQ ID NO: 32645 - protein, 14 aa, BK virus
IAAIGLTPQTYAVI

SEQ ID NO: 32646 - protein, 14 aa, BK virus
AAIGLTPQTYAVIA

SEQ ID NO: 32647 - protein, 14 aa, BK virus
AIGLTPQTYAVIAG

SEQ ID NO: 32648 - protein, 14 aa, BK virus
IGLTPQTYAVIAGA

SEQ ID NO: 32649 - protein, 14 aa, BK virus
GLTPQTYAVIAGAP

SEQ ID NO: 32650 - protein, 14 aa, BK virus
LTPQTYAVIAGAPG

SEQ ID NO: 32651 - protein, 14 aa, BK virus
TPQTYAVIAGAPGA

SEQ ID NO: 32652 - protein, 14 aa, BK virus
PQTYAVIAGAPGAI

SEQ ID NO: 32653 - protein, 14 aa, BK virus
QTYAVIAGAPGAIA

SEQ ID NO: 32654 - protein, 14 aa, BK virus
TYAVIAGAPGAIAG

SEQ ID NO: 32655 - protein, 14 aa, BK virus
YAVIAGAPGAIAGF

SEQ ID NO: 32656 - protein, 14 aa, BK virus
AVIAGAPGAIAGFA

SEQ ID NO: 32657 - protein, 14 aa, BK virus
VIAGAPGAIAGFAA

SEQ ID NO: 32658 - protein, 14 aa, BK virus
IAGAPGAIAGFAAL

SEQ ID NO: 32659 - protein, 14 aa, BK virus
AGAPGAIAGFAALI

SEQ ID NO: 32660 - protein, 14 aa, BK virus
GAPGAIAGFAALIQ

SEQ ID NO: 32661 - protein, 14 aa, BK virus
APGAIAGFAALIQT

SEQ ID NO: 32662 - protein, 14 aa, BK virus
PGAIAGFAALIQTV

SEQ ID NO: 32663 - protein, 14 aa, BK virus
GAIAGFAALIQTVS

SEQ ID NO: 32664 - protein, 14 aa, BK virus
AIAGFAALIQTVSG

SEQ ID NO: 32665 - protein, 14 aa, BK virus
IAGFAALIQTVSGI

SEQ ID NO: 32666 - protein, 14 aa, BK virus
AGFAALIQTVSGIS

SEQ ID NO: 32667 - protein, 14 aa, BK virus
GFAALIQTVSGISS

SEQ ID NO: 32668 - protein, 14 aa, BK virus
FAALIQTVSGISSL

SEQ ID NO: 32669 - protein, 14 aa, BK virus
AALIQTVSGISSLA

SEQ ID NO: 32670 - protein, 14 aa, BK virus
ALIQTVSGISSLAQ

SEQ ID NO: 32671 - protein, 14 aa, BK virus
LIQTVSGISSLAQV

SEQ ID NO: 32672 - protein, 14 aa, BK virus
IQTVSGISSLAQVG

SEQ ID NO: 32673 - protein, 14 aa, BK virus
QTVSGISSLAQVGY

SEQ ID NO: 32674 - protein, 14 aa, BK virus
TVSGISSLAQVGYK

SEQ ID NO: 32675 - protein, 14 aa, BK virus
VSGISSLAQVGYKF

SEQ ID NO: 32676 - protein, 14 aa, BK virus
SGISSLAQVGYKFF

SEQ ID NO: 32677 - protein, 14 aa, BK virus
GISSLAQVGYKFFD

SEQ ID NO: 32678 - protein, 14 aa, BK virus
ISSLAQVGYKFFDD

SEQ ID NO: 32679 - protein, 14 aa, BK virus
SSLAQVGYKFFDDW

SEQ ID NO: 32680 - protein, 14 aa, BK virus
SLAQVGYKFFDDWD

SEQ ID NO: 32681 - protein, 14 aa, BK virus
LAQVGYKFFDDWDH

SEQ ID NO: 32682 - protein, 14 aa, BK virus
AQVGYKFFDDWDHK

SEQ ID NO: 32683 - protein, 14 aa, BK virus
QVGYKFFDDWDHKV

SEQ ID NO: 32684 - protein, 14 aa, BK virus
VGYKFFDDWDHKVS

SEQ ID NO: 32685 - protein, 14 aa, BK virus
GYKFFDDWDHKVST

SEQ ID NO: 32686 - protein, 14 aa, BK virus
YKFFDDWDHKVSTV

SEQ ID NO: 32687 - protein, 14 aa, BK virus
KFFDDWDHKVSTVG

SEQ ID NO: 32688 - protein, 14 aa, BK virus
FFDDWDHKVSTVGL

SEQ ID NO: 32689 - protein, 14 aa, BK virus
FDDWDHKVSTVGLY

SEQ ID NO: 32690 - protein, 14 aa, BK virus
DDWDHKVSTVGLYQ

SEQ ID NO: 32691 - protein, 14 aa, BK virus
DWDHKVSTVGLYQQ

SEQ ID NO: 32692 - protein, 14 aa, BK virus
WDHKVSTVGLYQQS

SEQ ID NO: 32693 - protein, 14 aa, BK virus
DHKVSTVGLYQQSG

SEQ ID NO: 32694 - protein, 14 aa, BK virus
HKVSTVGLYQQSGM

SEQ ID NO: 32695 - protein, 14 aa, BK virus
KVSTVGLYQQSGMA

SEQ ID NO: 32696 - protein, 14 aa, BK virus
VSTVGLYQQSGMAL

SEQ ID NO: 32697 - protein, 14 aa, BK virus
STVGLYQQSGMALE

SEQ ID NO: 32698 - protein, 14 aa, BK virus
TVGLYQQSGMALEL

SEQ ID NO: 32699 - protein, 14 aa, BK virus
VGLYQQSGMALELF

SEQ ID NO: 32700 - protein, 14 aa, BK virus
GLYQQSGMALELFN

SEQ ID NO: 32701 - protein, 14 aa, BK virus
LYQQSGMALELFNP

SEQ ID NO: 32702 - protein, 14 aa, BK virus
YQQSGMALELFNPD

SEQ ID NO: 32703 - protein, 14 aa, BK virus
QQSGMALELFNPDE

SEQ ID NO: 32704 - protein, 14 aa, BK virus
QSGMALELFNPDEY

SEQ ID NO: 32705 - protein, 14 aa, BK virus
SGMALELFNPDEYY

SEQ ID NO: 32706 - protein, 14 aa, BK virus
GMALELFNPDEYYD

SEQ ID NO: 32707 - protein, 14 aa, BK virus
MALELFNPDEYYDI

SEQ ID NO: 32708 - protein, 14 aa, BK virus
ALELFNPDEYYDIL

SEQ ID NO: 32709 - protein, 14 aa, BK virus
LELFNPDEYYDILF

SEQ ID NO: 32710 - protein, 14 aa, BK virus
ELFNPDEYYDILFP

SEQ ID NO: 32711 - protein, 14 aa, BK virus
LFNPDEYYDILFPG

SEQ ID NO: 32712 - protein, 14 aa, BK virus
FNPDEYYDILFPGV

SEQ ID NO: 32713 - protein, 14 aa, BK virus
NPDEYYDILFPGVN

SEQ ID NO: 32714 - protein, 14 aa, BK virus
PDEYYDILFPGVNT

SEQ ID NO: 32715 - protein, 14 aa, BK virus
DEYYDILFPGVNTF

SEQ ID NO: 32716 - protein, 14 aa, BK virus
EYYDILFPGVNTFV

SEQ ID NO: 32717 - protein, 14 aa, BK virus
YYDILFPGVNTFVN

SEQ ID NO: 32718 - protein, 14 aa, BK virus
YDILFPGVNTFVNN

SEQ ID NO: 32719 - protein, 14 aa, BK virus
DILFPGVNTFVNNI

SEQ ID NO: 32720 - protein, 14 aa, BK virus
ILFPGVNTFVNNIQ

SEQ ID NO: 32721 - protein, 14 aa, BK virus
LFPGVNTFVNNIQY

SEQ ID NO: 32722 - protein, 14 aa, BK virus
FPGVNTFVNNIQYL

SEQ ID NO: 32723 - protein, 14 aa, BK virus
PGVNTFVNNIQYLD

SEQ ID NO: 32724 - protein, 14 aa, BK virus
GVNTFVNNIQYLDP

SEQ ID NO: 32725 - protein, 14 aa, BK virus
VNTFVNNIQYLDPR

SEQ ID NO: 32726 - protein, 14 aa, BK virus
NTFVNNIQYLDPRH

SEQ ID NO: 32727 - protein, 14 aa, BK virus
TFVNNIQYLDPRHW

SEQ ID NO: 32728 - protein, 14 aa, BK virus
FVNNIQYLDPRHWG

SEQ ID NO: 32729 - protein, 14 aa, BK virus
VNNIQYLDPRHWGP

SEQ ID NO: 32730 - protein, 14 aa, BK virus
NNIQYLDPRHWGPS

SEQ ID NO: 32731 - protein, 14 aa, BK virus
NIQYLDPRHWGPSL

SEQ ID NO: 32732 - protein, 14 aa, BK virus
IQYLDPRHWGPSLF

SEQ ID NO: 32733 - protein, 14 aa, BK virus
QYLDPRHWGPSLFA

SEQ ID NO: 32734 - protein, 14 aa, BK virus
YLDPRHWGPSLFAT

SEQ ID NO: 32735 - protein, 14 aa, BK virus
LDPRHWGPSLFATI

SEQ ID NO: 32736 - protein, 14 aa, BK virus
DPRHWGPSLFATIS

SEQ ID NO: 32737 - protein, 14 aa, BK virus
PRHWGPSLFATISQ

SEQ ID NO: 32738 - protein, 14 aa, BK virus
RHWGPSLFATISQA

SEQ ID NO: 32739 - protein, 14 aa, BK virus
HWGPSLFATISQAL

SEQ ID NO: 32740 - protein, 14 aa, BK virus
WGPSLFATISQALW

SEQ ID NO: 32741 - protein, 14 aa, BK virus
GPSLFATISQALWH

SEQ ID NO: 32742 - protein, 14 aa, BK virus
PSLFATISQALWHV

SEQ ID NO: 32743 - protein, 14 aa, BK virus
SLFATISQALWHVI

SEQ ID NO: 32744 - protein, 14 aa, BK virus
LFATISQALWHVIR

SEQ ID NO: 32745 - protein, 14 aa, BK virus
FATISQALWHVIRD

SEQ ID NO: 32746 - protein, 14 aa, BK virus
ATISQALWHVIRDD

SEQ ID NO: 32747 - protein, 14 aa, BK virus
TISQALWHVIRDDI

SEQ ID NO: 32748 - protein, 14 aa, BK virus
ISQALWHVIRDDIP

SEQ ID NO: 32749 - protein, 14 aa, BK virus
SQALWHVIRDDIPS

SEQ ID NO: 32750 - protein, 14 aa, BK virus
QALWHVIRDDIPSI

SEQ ID NO: 32751 - protein, 14 aa, BK virus
ALWHVIRDDIPSIT

SEQ ID NO: 32752 - protein, 14 aa, BK virus
LWHVIRDDIPSITS

SEQ ID NO: 32753 - protein, 14 aa, BK virus
WHVIRDDIPSITSQ

SEQ ID NO: 32754 - protein, 14 aa, BK virus
HVIRDDIPSITSQE

SEQ ID NO: 32755 - protein, 14 aa, BK virus
VIRDDIPSITSQEL

SEQ ID NO: 32756 - protein, 14 aa, BK virus
IRDDIPSITSQELQ

SEQ ID NO: 32757 - protein, 14 aa, BK virus
RDDIPSITSQELQR

SEQ ID NO: 32758 - protein, 14 aa, BK virus
DDIPSITSQELQRR

SEQ ID NO: 32759 - protein, 14 aa, BK virus
DIPSITSQELQRRT

SEQ ID NO: 32760 - protein, 14 aa, BK virus
IPSITSQELQRRTE

SEQ ID NO: 32761 - protein, 14 aa, BK virus
PSITSQELQRRTER

SEQ ID NO: 32762 - protein, 14 aa, BK virus
SITSQELQRRTERF

SEQ ID NO: 32763 - protein, 14 aa, BK virus
ITSQELQRRTERFF

SEQ ID NO: 32764 - protein, 14 aa, BK virus
TSQELQRRTERFFR

SEQ ID NO: 32765 - protein, 14 aa, BK virus
SQELQRRTERFFRD

SEQ ID NO: 32766 - protein, 14 aa, BK virus
QELQRRTERFFRDS

SEQ ID NO: 32767 - protein, 14 aa, BK virus
ELQRRTERFFRDSL

SEQ ID NO: 32768 - protein, 14 aa, BK virus
LQRRTERFFRDSLA

SEQ ID NO: 32769 - protein, 14 aa, BK virus
QRRTERFFRDSLAR

SEQ ID NO: 32770 - protein, 14 aa, BK virus
RRTERFFRDSLARF

SEQ ID NO: 32771 - protein, 14 aa, BK virus
RTERFFRDSLARFL

SEQ ID NO: 32772 - protein, 14 aa, BK virus
TERFFRDSLARFLE

SEQ ID NO: 32773 - protein, 14 aa, BK virus
ERFFRDSLARFLEE

SEQ ID NO: 32774 - protein, 14 aa, BK virus
RFFRDSLARFLEET

SEQ ID NO: 32775 - protein, 14 aa, BK virus
FFRDSLARFLEETT

SEQ ID NO: 32776 - protein, 14 aa, BK virus
FRDSLARFLEETTW

SEQ ID NO: 32777 - protein, 14 aa, BK virus
RDSLARFLEETTWT

SEQ ID NO: 32778 - protein, 14 aa, BK virus
DSLARFLEETTWTI

SEQ ID NO: 32779 - protein, 14 aa, BK virus
SLARFLEETTWTIV

SEQ ID NO: 32780 - protein, 14 aa, BK virus
LARFLEETTWTIVN

SEQ ID NO: 32781 - protein, 14 aa, BK virus
ARFLEETTWTIVNA

SEQ ID NO: 32782 - protein, 14 aa, BK virus
RFLEETTWTIVNAP

SEQ ID NO: 32783 - protein, 14 aa, BK virus
FLEETTWTIVNAPI

SEQ ID NO: 32784 - protein, 14 aa, BK virus
LEETTWTIVNAPIN

SEQ ID NO: 32785 - protein, 14 aa, BK virus
EETTWTIVNAPINF

SEQ ID NO: 32786 - protein, 14 aa, BK virus
ETTWTIVNAPINFY

SEQ ID NO: 32787 - protein, 14 aa, BK virus
TTWTIVNAPINFYN

SEQ ID NO: 32788 - protein, 14 aa, BK virus
TWTIVNAPINFYNY

SEQ ID NO: 32789 - protein, 14 aa, BK virus
WTIVNAPINFYNYI

SEQ ID NO: 32790 - protein, 14 aa, BK virus
TIVNAPINFYNYIQ

SEQ ID NO: 32791 - protein, 14 aa, BK virus
IVNAPINFYNYIQQ

SEQ ID NO: 32792 - protein, 14 aa, BK virus
VNAPINFYNYIQQY

SEQ ID NO: 32793 - protein, 14 aa, BK virus
NAPINFYNYIQQYY

SEQ ID NO: 32794 - protein, 14 aa, BK virus
APINFYNYIQQYYS

SEQ ID NO: 32795 - protein, 14 aa, BK virus
PINFYNYIQQYYSD

SEQ ID NO: 32796 - protein, 14 aa, BK virus
INFYNYIQQYYSDL

SEQ ID NO: 32797 - protein, 14 aa, BK virus
NFYNYIQQYYSDLS

SEQ ID NO: 32798 - protein, 14 aa, BK virus
FYNYIQQYYSDLSP

SEQ ID NO: 32799 - protein, 14 aa, BK virus
YNYIQQYYSDLSPI

SEQ ID NO: 32800 - protein, 14 aa, BK virus
NYIQQYYSDLSPIR

SEQ ID NO: 32801 - protein, 14 aa, BK virus
YIQQYYSDLSPIRP

SEQ ID NO: 32802 - protein, 14 aa, BK virus
IQQYYSDLSPIRPS

SEQ ID NO: 32803 - protein, 14 aa, BK virus
QQYYSDLSPIRPSM

SEQ ID NO: 32804 - protein, 14 aa, BK virus
QYYSDLSPIRPSMV

SEQ ID NO: 32805 - protein, 14 aa, BK virus
YYSDLSPIRPSMVR

SEQ ID NO: 32806 - protein, 14 aa, BK virus
YSDLSPIRPSMVRQ

SEQ ID NO: 32807 - protein, 14 aa, BK virus
SDLSPIRPSMVRQV

SEQ ID NO: 32808 - protein, 14 aa, BK virus
DLSPIRPSMVRQVA

SEQ ID NO: 32809 - protein, 14 aa, BK virus
LSPIRPSMVRQVAE

SEQ ID NO: 32810 - protein, 14 aa, BK virus
SPIRPSMVRQVAER

SEQ ID NO: 32811 - protein, 14 aa, BK virus
PIRPSMVRQVAERE

SEQ ID NO: 32812 - protein, 14 aa, BK virus
IRPSMVRQVAEREG

SEQ ID NO: 32813 - protein, 14 aa, BK virus
RPSMVRQVAEREGT

SEQ ID NO: 32814 - protein, 14 aa, BK virus
PSMVRQVAEREGTR

SEQ ID NO: 32815 - protein, 14 aa, BK virus
SMVRQVAEREGTRV

SEQ ID NO: 32816 - protein, 14 aa, BK virus
MVRQVAEREGTRVH

SEQ ID NO: 32817 - protein, 14 aa, BK virus
VRQVAEREGTRVHF

SEQ ID NO: 32818 - protein, 14 aa, BK virus
RQVAEREGTRVHFG

SEQ ID NO: 32819 - protein, 14 aa, BK virus
QVAEREGTRVHFGH

SEQ ID NO: 32820 - protein, 14 aa, BK virus
VAEREGTRVHFGHT

SEQ ID NO: 32821 - protein, 14 aa, BK virus
AEREGTRVHFGHTY

SEQ ID NO: 32822 - protein, 14 aa, BK virus
EREGTRVHFGHTYS

SEQ ID NO: 32823 - protein, 14 aa, BK virus
REGTRVHFGHTYSI

SEQ ID NO: 32824 - protein, 14 aa, BK virus
EGTRVHFGHTYSID

SEQ ID NO: 32825 - protein, 14 aa, BK virus
GTRVHFGHTYSIDD

SEQ ID NO: 32826 - protein, 14 aa, BK virus
TRVHFGHTYSIDDA

SEQ ID NO: 32827 - protein, 14 aa, BK virus
RVHFGHTYSIDDAD

SEQ ID NO: 32828 - protein, 14 aa, BK virus
VHFGHTYSIDDADS

SEQ ID NO: 32829 - protein, 14 aa, BK virus
HFGHTYSIDDADSI

SEQ ID NO: 32830 - protein, 14 aa, BK virus
FGHTYSIDDADSIE

SEQ ID NO: 32831 - protein, 14 aa, BK virus
GHTYSIDDADSIEE

SEQ ID NO: 32832 - protein, 14 aa, BK virus
HTYSIDDADSIEEV

SEQ ID NO: 32833 - protein, 14 aa, BK virus
TYSIDDADSIEEVT

SEQ ID NO: 32834 - protein, 14 aa, BK virus
YSIDDADSIEEVTQ

SEQ ID NO: 32835 - protein, 14 aa, BK virus
SIDDADSIEEVTQR

SEQ ID NO: 32836 - protein, 14 aa, BK virus
IDDADSIEEVTQRM

SEQ ID NO: 32837 - protein, 14 aa, BK virus
DDADSIEEVTQRMD

SEQ ID NO: 32838 - protein, 14 aa, BK virus
DADSIEEVTQRMDL

SEQ ID NO: 32839 - protein, 14 aa, BK virus
ADSIEEVTQRMDLR

SEQ ID NO: 32840 - protein, 14 aa, BK virus
DSIEEVTQRMDLRN

SEQ ID NO: 32841 - protein, 14 aa, BK virus
SIEEVTQRMDLRNQ

SEQ ID NO: 32842 - protein, 14 aa, BK virus
IEEVTQRMDLRNQQ

SEQ ID NO: 32843 - protein, 14 aa, BK virus
EEVTQRMDLRNQQS

SEQ ID NO: 32844 - protein, 14 aa, BK virus
EVTQRMDLRNQQSV

SEQ ID NO: 32845 - protein, 14 aa, BK virus
VTQRMDLRNQQSVH

SEQ ID NO: 32846 - protein, 14 aa, BK virus
TQRMDLRNQQSVHS

SEQ ID NO: 32847 - protein, 14 aa, BK virus
QRMDLRNQQSVHSG

SEQ ID NO: 32848 - protein, 14 aa, BK virus
RMDLRNQQSVHSGE

SEQ ID NO: 32849 - protein, 14 aa, BK virus
MDLRNQQSVHSGEF

SEQ ID NO: 32850 - protein, 14 aa, BK virus
DLRNQQSVHSGEFI

SEQ ID NO: 32851 - protein, 14 aa, BK virus
LRNQQSVHSGEFIE

SEQ ID NO: 32852 - protein, 14 aa, BK virus
RNQQSVHSGEFIEK

SEQ ID NO: 32853 - protein, 14 aa, BK virus
NQQSVHSGEFIEKT

SEQ ID NO: 32854 - protein, 14 aa, BK virus
QQSVHSGEFIEKTI

SEQ ID NO: 32855 - protein, 14 aa, BK virus
QSVHSGEFIEKTIA

SEQ ID NO: 32856 - protein, 14 aa, BK virus
SVHSGEFIEKTIAP

SEQ ID NO: 32857 - protein, 14 aa, BK virus
VHSGEFIEKTIAPG

SEQ ID NO: 32858 - protein, 14 aa, BK virus
HSGEFIEKTIAPGG

SEQ ID NO: 32859 - protein, 14 aa, BK virus
SGEFIEKTIAPGGA

SEQ ID NO: 32860 - protein, 14 aa, BK virus
GEFIEKTIAPGGAN

SEQ ID NO: 32861 - protein, 14 aa, BK virus
EFIEKTIAPGGANQ

SEQ ID NO: 32862 - protein, 14 aa, BK virus
FIEKTIAPGGANQR

SEQ ID NO: 32863 - protein, 14 aa, BK virus
IEKTIAPGGANQRT

SEQ ID NO: 32864 - protein, 14 aa, BK virus
EKTIAPGGANQRTA

SEQ ID NO: 32865 - protein, 14 aa, BK virus
KTIAPGGANQRTAP

SEQ ID NO: 32866 - protein, 14 aa, BK virus
TIAPGGANQRTAPQ

SEQ ID NO: 32867 - protein, 14 aa, BK virus
IAPGGANQRTAPQW

SEQ ID NO: 32868 - protein, 14 aa, BK virus
APGGANQRTAPQWM

SEQ ID NO: 32869 - protein, 14 aa, BK virus
PGGANQRTAPQWML

SEQ ID NO: 32870 - protein, 14 aa, BK virus
GGANQRTAPQWMLP

SEQ ID NO: 32871 - protein, 14 aa, BK virus
GANQRTAPQWMLPL

SEQ ID NO: 32872 - protein, 14 aa, BK virus
ANQRTAPQWMLPLL

SEQ ID NO: 32873 - protein, 14 aa, BK virus
NQRTAPQWMLPLLL

SEQ ID NO: 32874 - protein, 14 aa, BK virus
QRTAPQWMLPLLLG

SEQ ID NO: 32875 - protein, 14 aa, BK virus
RTAPQWMLPLLLGL

SEQ ID NO: 32876 - protein, 14 aa, BK virus
TAPQWMLPLLLGLY

SEQ ID NO: 32877 - protein, 14 aa, BK virus
APQWMLPLLLGLYG

SEQ ID NO: 32878 - protein, 14 aa, BK virus
PQWMLPLLLGLYGT

SEQ ID NO: 32879 - protein, 14 aa, BK virus
QWMLPLLLGLYGTV

SEQ ID NO: 32880 - protein, 14 aa, BK virus
WMLPLLLGLYGTVT

SEQ ID NO: 32881 - protein, 14 aa, BK virus
MLPLLLGLYGTVTP

SEQ ID NO: 32882 - protein, 14 aa, BK virus
LPLLLGLYGTVTPA

SEQ ID NO: 32883 - protein, 14 aa, BK virus
PLLLGLYGTVTPAL

SEQ ID NO: 32884 - protein, 14 aa, BK virus
LLLGLYGTVTPALE

SEQ ID NO: 32885 - protein, 14 aa, BK virus
LLGLYGTVTPALEA

SEQ ID NO: 32886 - protein, 14 aa, BK virus
LGLYGTVTPALEAY

SEQ ID NO: 32887 - protein, 14 aa, BK virus
GLYGTVTPALEAYE

SEQ ID NO: 32888 - protein, 14 aa, BK virus
LYGTVTPALEAYED

SEQ ID NO: 32889 - protein, 14 aa, BK virus
YGTVTPALEAYEDG

SEQ ID NO: 32890 - protein, 14 aa, BK virus
GTVTPALEAYEDGP

SEQ ID NO: 32891 - protein, 14 aa, BK virus
TVTPALEAYEDGPN

SEQ ID NO: 32892 - protein, 14 aa, BK virus
VTPALEAYEDGPNQ

SEQ ID NO: 32893 - protein, 14 aa, BK virus
TPALEAYEDGPNQK

SEQ ID NO: 32894 - protein, 14 aa, BK virus
PALEAYEDGPNQKK

SEQ ID NO: 32895 - protein, 14 aa, BK virus
ALEAYEDGPNQKKR

SEQ ID NO: 32896 - protein, 14 aa, BK virus
LEAYEDGPNQKKRR

SEQ ID NO: 32897 - protein, 14 aa, BK virus
EAYEDGPNQKKRRV

SEQ ID NO: 32898 - protein, 14 aa, BK virus
AYEDGPNQKKRRVS

SEQ ID NO: 32899 - protein, 14 aa, BK virus
YEDGPNQKKRRVSR

SEQ ID NO: 32900 - protein, 14 aa, BK virus
EDGPNQKKRRVSRG

SEQ ID NO: 32901 - protein, 14 aa, BK virus
DGPNQKKRRVSRGS

SEQ ID NO: 32902 - protein, 14 aa, BK virus
GPNQKKRRVSRGSS

SEQ ID NO: 32903 - protein, 14 aa, BK virus
PNQKKRRVSRGSSQ

SEQ ID NO: 32904 - protein, 14 aa, BK virus
NQKKRRVSRGSSQK

SEQ ID NO: 32905 - protein, 14 aa, BK virus
QKKRRVSRGSSQKA

SEQ ID NO: 32906 - protein, 14 aa, BK virus
KKRRVSRGSSQKAK

SEQ ID NO: 32907 - protein, 14 aa, BK virus
KRRVSRGSSQKAKG

SEQ ID NO: 32908 - protein, 14 aa, BK virus
RRVSRGSSQKAKGT

SEQ ID NO: 32909 - protein, 14 aa, BK virus
RVSRGSSQKAKGTR

SEQ ID NO: 32910 - protein, 14 aa, BK virus
VSRGSSQKAKGTRA

SEQ ID NO: 32911 - protein, 14 aa, BK virus
SRGSSQKAKGTRAS

SEQ ID NO: 32912 - protein, 14 aa, BK virus
RGSSQKAKGTRASA

SEQ ID NO: 32913 - protein, 14 aa, BK virus
GSSQKAKGTRASAK

SEQ ID NO: 32914 - protein, 14 aa, BK virus
SSQKAKGTRASAKT

SEQ ID NO: 32915 - protein, 14 aa, BK virus
SQKAKGTRASAKTT

SEQ ID NO: 32916 - protein, 14 aa, BK virus
QKAKGTRASAKTTN

SEQ ID NO: 32917 - protein, 14 aa, BK virus
KAKGTRASAKTTNK

SEQ ID NO: 32918 - protein, 14 aa, BK virus
AKGTRASAKTTNKR

SEQ ID NO: 32919 - protein, 14 aa, BK virus
KGTRASAKTTNKRR

SEQ ID NO: 32920 - protein, 14 aa, BK virus
GTRASAKTTNKRRS

SEQ ID NO: 32921 - protein, 14 aa, BK virus
TRASAKTTNKRRSR

SEQ ID NO: 32922 - protein, 14 aa, BK virus
RASAKTTNKRRSRS

SEQ ID NO: 32923 - protein, 14 aa, BK virus
ASAKTTNKRRSRSS

SEQ ID NO: 32924 - protein, 14 aa, BK virus
SAKTTNKRRSRSSR

SEQ ID NO: 32925 - protein, 14 aa, BK virus
AKTTNKRRSRSSRS

SEQ ID NO: 32926 - protein, 14 aa, BK virus
NWGRCYYRGRMLPK

SEQ ID NO: 32927 - protein, 14 aa, BK virus
WGRCYYRGRMLPKP

SEQ ID NO: 32928 - protein, 14 aa, BK virus
GRCYYRGRMLPKPR

SEQ ID NO: 32929 - protein, 14 aa, BK virus
RCYYRGRMLPKPRN

SEQ ID NO: 32930 - protein, 14 aa, BK virus
CYYRGRMLPKPRNG

SEQ ID NO: 32931 - protein, 14 aa, BK virus
YYRGRMLPKPRNGG

SEQ ID NO: 32932 - protein, 14 aa, BK virus
YRGRMLPKPRNGGS

SEQ ID NO: 32933 - protein, 14 aa, BK virus
RGRMLPKPRNGGSR

SEQ ID NO: 32934 - protein, 14 aa, BK virus
PREKNASLLQHSKN

SEQ ID NO: 32935 - protein, 14 aa, BK virus
REKNASLLQHSKNS

SEQ ID NO: 32936 - protein, 14 aa, BK virus
EKNASLLQHSKNSP

SEQ ID NO: 32937 - protein, 14 aa, BK virus
KNASLLQHSKNSPP

SEQ ID NO: 32938 - protein, 14 aa, BK virus
NASLLQHSKNSPPQ

SEQ ID NO: 32939 - protein, 14 aa, BK virus
ASLLQHSKNSPPQF

SEQ ID NO: 32940 - protein, 14 aa, BK virus
SLLQHSKNSPPQFK

SEQ ID NO: 32941 - protein, 14 aa, BK virus
GPNLWKSTDVGGCN

SEQ ID NO: 32942 - protein, 14 aa, BK virus
PNLWKSTDVGGCNC

SEQ ID NO: 32943 - protein, 14 aa, BK virus
NLWKSTDVGGCNCT

SEQ ID NO: 32944 - protein, 14 aa, BK virus
LWKSTDVGGCNCTN

SEQ ID NO: 32945 - protein, 14 aa, BK virus
WKSTDVGGCNCTNR

SEQ ID NO: 32946 - protein, 14 aa, BK virus
KSTDVGGCNCTNRG

SEQ ID NO: 32947 - protein, 14 aa, BK virus
STDVGGCNCTNRGY

SEQ ID NO: 32948 - protein, 14 aa, BK virus
TDVGGCNCTNRGYW

SEQ ID NO: 32949 - protein, 14 aa, BK virus
DVGGCNCTNRGYWN

SEQ ID NO: 32950 - protein, 14 aa, BK virus
VGGCNCTNRGYWNN

SEQ ID NO: 32951 - protein, 14 aa, BK virus
FPLLCCRWRTLGNA

SEQ ID NO: 32952 - protein, 14 aa, BK virus
PLLCCRWRTLGNAG

SEQ ID NO: 32953 - protein, 14 aa, BK virus
LLCCRWRTLGNAGS

SEQ ID NO: 32954 - protein, 14 aa, BK virus
LCCRWRTLGNAGSA

SEQ ID NO: 32955 - protein, 14 aa, BK virus
CCRWRTLGNAGSAN

SEQ ID NO: 32956 - protein, 14 aa, BK virus
CRWRTLGNAGSANE

SEQ ID NO: 32957 - protein, 14 aa, BK virus
RWRTLGNAGSANEL

SEQ ID NO: 32958 - protein, 14 aa, BK virus
WRTLGNAGSANELQ

SEQ ID NO: 32959 - protein, 14 aa, BK virus
RTLGNAGSANELQV

SEQ ID NO: 32960 - protein, 14 aa, BK virus
TLGNAGSANELQVK

SEQ ID NO: 32961 - protein, 14 aa, BK virus
LGNAGSANELQVKV

SEQ ID NO: 32962 - protein, 14 aa, BK virus
GNAGSANELQVKVP

SEQ ID NO: 32963 - protein, 14 aa, BK virus
VFWDFHRRGKCSPS

SEQ ID NO: 32964 - protein, 14 aa, BK virus
FWDFHRRGKCSPST

SEQ ID NO: 32965 - protein, 14 aa, BK virus
WDFHRRGKCSPSTS

SEQ ID NO: 32966 - protein, 14 aa, BK virus
DFHRRGKCSPSTSC

SEQ ID NO: 32967 - protein, 14 aa, BK virus
FHRRGKCSPSTSCD

SEQ ID NO: 32968 - protein, 14 aa, BK virus
HRRGKCSPSTSCDQ

SEQ ID NO: 32969 - protein, 14 aa, BK virus
RRGKCSPSTSCDQH

SEQ ID NO: 32970 - protein, 14 aa, BK virus
RGKCSPSTSCDQHS

SEQ ID NO: 32971 - protein, 14 aa, BK virus
GKCSPSTSCDQHSY

SEQ ID NO: 32972 - protein, 14 aa, BK virus
KCSPSTSCDQHSYH

SEQ ID NO: 32973 - protein, 14 aa, BK virus
CSPSTSCDQHSYHS

SEQ ID NO: 32974 - protein, 14 aa, BK virus
SPSTSCDQHSYHSV

SEQ ID NO: 32975 - protein, 14 aa, BK virus
PSTSCDQHSYHSVA

SEQ ID NO: 32976 - protein, 14 aa, BK virus
STSCDQHSYHSVAR

SEQ ID NO: 32977 - protein, 14 aa, BK virus
QLWNTTVERPCKIF

SEQ ID NO: 32978 - protein, 14 aa, BK virus
DPPEKKICKESLPN

SEQ ID NO: 32979 - protein, 14 aa, BK virus
PPEKKICKESLPNF

SEQ ID NO: 32980 - protein, 14 aa, BK virus
PEKKICKESLPNFL

SEQ ID NO: 32981 - protein, 14 aa, BK virus
EKKICKESLPNFLF

SEQ ID NO: 32982 - protein, 14 aa, BK virus
KKICKESLPNFLFA

SEQ ID NO: 32983 - protein, 14 aa, BK virus
KICKESLPNFLFAK

SEQ ID NO: 32984 - protein, 14 aa, BK virus
PYKQENPESGWAAY

SEQ ID NO: 32985 - protein, 14 aa, BK virus
YKQENPESGWAAYV

SEQ ID NO: 32986 - protein, 14 aa, BK virus
KQENPESGWAAYVW

SEQ ID NO: 32987 - protein, 14 aa, BK virus
QENPESGWAAYVWY

SEQ ID NO: 32988 - protein, 14 aa, BK virus
ENPESGWAAYVWYG

SEQ ID NO: 32989 - protein, 14 aa, BK virus
NPESGWAAYVWYGI

SEQ ID NO: 32990 - protein, 14 aa, BK virus
PESGWAAYVWYGIP

SEQ ID NO: 32991 - protein, 14 aa, BK virus
ESGWAAYVWYGIPG

SEQ ID NO: 32992 - protein, 14 aa, BK virus
SGWAAYVWYGIPGR

SEQ ID NO: 32993 - protein, 14 aa, BK virus
GWAAYVWYGIPGRR

SEQ ID NO: 32994 - protein, 14 aa, BK virus
WAAYVWYGIPGRRG

SEQ ID NO: 32995 - protein, 14 aa, BK virus
WHRKTSRGPRYDKI

SEQ ID NO: 32996 - protein, 14 aa, BK virus
HRKTSRGPRYDKIY

SEQ ID NO: 32997 - protein, 14 aa, BK virus
QTGTIANQNALNRC

SEQ ID NO: 32998 - protein, 14 aa, BK virus
TGTIANQNALNRCF

SEQ ID NO: 32999 - protein, 14 aa, BK virus
GTIANQNALNRCFY

SEQ ID NO: 33000 - protein, 14 aa, BK virus
TIANQNALNRCFYC

SEQ ID NO: 33001 - protein, 14 aa, BK virus
IANQNALNRCFYCT

SEQ ID NO: 33002 - protein, 14 aa, BK virus
ANQNALNRCFYCTY

SEQ ID NO: 33003 - protein, 14 aa, BK virus
NQNALNRCFYCTYT

SEQ ID NO: 33004 - protein, 14 aa, BK virus
QNALNRCFYCTYTF

SEQ ID NO: 33005 - protein, 14 aa, BK virus
NALNRCFYCTYTFN

SEQ ID NO: 33006 - protein, 14 aa, BK virus
ALNRCFYCTYTFNK

SEQ ID NO: 33007 - protein, 14 aa, BK virus
LNRCFYCTYTFNKC

SEQ ID NO: 33008 - protein, 14 aa, BK virus
NRCFYCTYTFNKCC

SEQ ID NO: 33009 - protein, 14 aa, BK virus
RCFYCTYTFNKCCF

SEQ ID NO: 33010 - protein, 14 aa, BK virus
CFYCTYTFNKCCFC

SEQ ID NO: 33011 - protein, 14 aa, BK virus
FYCTYTFNKCCFCI

SEQ ID NO: 33012 - protein, 14 aa, BK virus
YCTYTFNKCCFCIS

SEQ ID NO: 33013 - protein, 14 aa, BK virus
CTYTFNKCCFCISH

SEQ ID NO: 33014 - protein, 14 aa, BK virus
TYTFNKCCFCISHF

SEQ ID NO: 33015 - protein, 14 aa, BK virus
NTESLYTNATLDYG

SEQ ID NO: 33016 - protein, 14 aa, BK virus
TESLYTNATLDYGG

SEQ ID NO: 33017 - protein, 14 aa, BK virus
ESLYTNATLDYGGL

SEQ ID NO: 33018 - protein, 14 aa, BK virus
SLYTNATLDYGGLT

SEQ ID NO: 33019 - protein, 14 aa, BK virus
LYTNATLDYGGLTF

SEQ ID NO: 33020 - protein, 14 aa, BK virus
YTNATLDYGGLTFG

SEQ ID NO: 33021 - protein, 14 aa, BK virus
TNATLDYGGLTFGN

SEQ ID NO: 33022 - protein, 14 aa, BK virus
NATLDYGGLTFGNL

SEQ ID NO: 33023 - protein, 14 aa, BK virus
ATLDYGGLTFGNLQ

SEQ ID NO: 33024 - protein, 14 aa, BK virus
TLDYGGLTFGNLQQ

SEQ ID NO: 33025 - protein, 14 aa, BK virus
LDYGGLTFGNLQQG

SEQ ID NO: 33026 - protein, 14 aa, BK virus
DYGGLTFGNLQQGL

SEQ ID NO: 33027 - protein, 14 aa, BK virus
YGGLTFGNLQQGLK

SEQ ID NO: 33028 - protein, 14 aa, BK virus
GGLTFGNLQQGLKY

SEQ ID NO: 33029 - protein, 14 aa, BK virus
GLTFGNLQQGLKYL

SEQ ID NO: 33030 - protein, 14 aa, BK virus
LTFGNLQQGLKYLR

SEQ ID NO: 33031 - protein, 14 aa, BK virus
TFGNLQQGLKYLRL

SEQ ID NO: 33032 - protein, 14 aa, BK virus
FGNLQQGLKYLRLG

SEQ ID NO: 33033 - protein, 14 aa, BK virus
GNLQQGLKYLRLGK

SEQ ID NO: 33034 - protein, 14 aa, BK virus
NLQQGLKYLRLGKS

SEQ ID NO: 33035 - protein, 14 aa, BK virus
LQQGLKYLRLGKSI

SEQ ID NO: 33036 - protein, 14 aa, BK virus
QQGLKYLRLGKSIV

SEQ ID NO: 33037 - protein, 14 aa, BK virus
QGLKYLRLGKSIVI

SEQ ID NO: 33038 - protein, 14 aa, BK virus
GLKYLRLGKSIVIG

SEQ ID NO: 33039 - protein, 14 aa, BK virus
LKYLRLGKSIVIGI

SEQ ID NO: 33040 - protein, 14 aa, BK virus
KYLRLGKSIVIGIQ

SEQ ID NO: 33041 - protein, 14 aa, BK virus
YLRLGKSIVIGIQC

SEQ ID NO: 33042 - protein, 14 aa, BK virus
LRLGKSIVIGIQCL

SEQ ID NO: 33043 - protein, 14 aa, BK virus
RLGKSIVIGIQCLI

SEQ ID NO: 33044 - protein, 14 aa, BK virus
LGKSIVIGIQCLIH

SEQ ID NO: 33045 - protein, 14 aa, BK virus
GKSIVIGIQCLIHV

SEQ ID NO: 33046 - protein, 14 aa, BK virus
KSIVIGIQCLIHVQ

SEQ ID NO: 33047 - protein, 14 aa, BK virus
SIVIGIQCLIHVQS

SEQ ID NO: 33048 - protein, 14 aa, BK virus
IVIGIQCLIHVQSL

SEQ ID NO: 33049 - protein, 14 aa, BK virus
VIGIQCLIHVQSLQ

SEQ ID NO: 33050 - protein, 14 aa, BK virus
IGIQCLIHVQSLQF

SEQ ID NO: 33051 - protein, 14 aa, BK virus
GIQCLIHVQSLQFL

SEQ ID NO: 33052 - protein, 14 aa, BK virus
IQCLIHVQSLQFLN

SEQ ID NO: 33053 - protein, 14 aa, BK virus
QCLIHVQSLQFLNP

SEQ ID NO: 33054 - protein, 14 aa, BK virus
CLIHVQSLQFLNPL

SEQ ID NO: 33055 - protein, 14 aa, BK virus
LIHVQSLQFLNPLL

SEQ ID NO: 33056 - protein, 14 aa, BK virus
IHVQSLQFLNPLLL

SEQ ID NO: 33057 - protein, 14 aa, BK virus
YQEYISPCIYYISS

SEQ ID NO: 33058 - protein, 14 aa, BK virus
QEYISPCIYYISSL

SEQ ID NO: 33059 - protein, 14 aa, BK virus
EYISPCIYYISSLK

SEQ ID NO: 33060 - protein, 14 aa, BK virus
YISPCIYYISSLKK

SEQ ID NO: 33061 - protein, 14 aa, BK virus
ISPCIYYISSLKKY

SEQ ID NO: 33062 - protein, 14 aa, BK virus
SPCIYYISSLKKYT

SEQ ID NO: 33063 - protein, 14 aa, BK virus
PCIYYISSLKKYTY

SEQ ID NO: 33064 - protein, 14 aa, BK virus
CIYYISSLKKYTYL

SEQ ID NO: 33065 - protein, 14 aa, BK virus
IYYISSLKKYTYLS

SEQ ID NO: 33066 - protein, 14 aa, BK virus
YYISSLKKYTYLSQ

SEQ ID NO: 33067 - protein, 14 aa, BK virus
YISSLKKYTYLSQN

SEQ ID NO: 33068 - protein, 14 aa, BK virus
ISSLKKYTYLSQNP

SEQ ID NO: 33069 - protein, 14 aa, BK virus
SSLKKYTYLSQNPA

SEQ ID NO: 33070 - protein, 14 aa, BK virus
SLKKYTYLSQNPAF

SEQ ID NO: 33071 - protein, 14 aa, BK virus
LKKYTYLSQNPAFP

SEQ ID NO: 33072 - protein, 14 aa, BK virus
KKYTYLSQNPAFPS

SEQ ID NO: 33073 - protein, 14 aa, BK virus
KYTYLSQNPAFPSI

SEQ ID NO: 33074 - protein, 14 aa, BK virus
YTYLSQNPAFPSIQ

SEQ ID NO: 33075 - protein, 14 aa, BK virus
TYLSQNPAFPSIQQ

SEQ ID NO: 33076 - protein, 14 aa, BK virus
YLSQNPAFPSIQQF

SEQ ID NO: 33077 - protein, 14 aa, BK virus
TKLAVATRSFHFVK

SEQ ID NO: 33078 - protein, 14 aa, BK virus
KLAVATRSFHFVKF

SEQ ID NO: 33079 - protein, 14 aa, BK virus
LAVATRSFHFVKFF

SEQ ID NO: 33080 - protein, 14 aa, BK virus
AVATRSFHFVKFFF

SEQ ID NO: 33081 - protein, 14 aa, BK virus
VATRSFHFVKFFFQ

SEQ ID NO: 33082 - protein, 14 aa, BK virus
ATRSFHFVKFFFQV

SEQ ID NO: 33083 - protein, 14 aa, BK virus
TRSFHFVKFFFQVR

SEQ ID NO: 33084 - protein, 14 aa, BK virus
RSFHFVKFFFQVRT

SEQ ID NO: 33085 - protein, 14 aa, BK virus
SFHFVKFFFQVRTL

SEQ ID NO: 33086 - protein, 14 aa, BK virus
FHFVKFFFQVRTLS

SEQ ID NO: 33087 - protein, 14 aa, BK virus
HFVKFFFQVRTLSF

SEQ ID NO: 33088 - protein, 14 aa, BK virus
FVKFFFQVRTLSFV

SEQ ID NO: 33089 - protein, 14 aa, BK virus
VKFFFQVRTLSFVR

SEQ ID NO: 33090 - protein, 14 aa, BK virus
KFFFQVRTLSFVRI

SEQ ID NO: 33091 - protein, 14 aa, BK virus
FFFQVRTLSFVRIF

SEQ ID NO: 33092 - protein, 14 aa, BK virus
FFQVRTLSFVRIFL

SEQ ID NO: 33093 - protein, 14 aa, BK virus
FQVRTLSFVRIFLN

SEQ ID NO: 33094 - protein, 14 aa, BK virus
QVRTLSFVRIFLNI

SEQ ID NO: 33095 - protein, 14 aa, BK virus
VRTLSFVRIFLNIF

SEQ ID NO: 33096 - protein, 14 aa, BK virus
RTLSFVRIFLNIFW

SEQ ID NO: 33097 - protein, 14 aa, BK virus
TLSFVRIFLNIFWA

SEQ ID NO: 33098 - protein, 14 aa, BK virus
PSLVEIFGFFCLNV

SEQ ID NO: 33099 - protein, 14 aa, BK virus
SLVEIFGFFCLNVS

SEQ ID NO: 33100 - protein, 14 aa, BK virus
LVEIFGFFCLNVSF

SEQ ID NO: 33101 - protein, 14 aa, BK virus
VEIFGFFCLNVSFL

SEQ ID NO: 33102 - protein, 14 aa, BK virus
EIFGFFCLNVSFLN

SEQ ID NO: 33103 - protein, 14 aa, BK virus
IFGFFCLNVSFLNL

SEQ ID NO: 33104 - protein, 14 aa, BK virus
FGFFCLNVSFLNLP

SEQ ID NO: 33105 - protein, 14 aa, BK virus
HFHLNNLSNCLNCL

SEQ ID NO: 33106 - protein, 14 aa, BK virus
FHLNNLSNCLNCLF

SEQ ID NO: 33107 - protein, 14 aa, BK virus
HLNNLSNCLNCLFH

SEQ ID NO: 33108 - protein, 14 aa, BK virus
LNNLSNCLNCLFHV

SEQ ID NO: 33109 - protein, 14 aa, BK virus
NNLSNCLNCLFHVL

SEQ ID NO: 33110 - protein, 14 aa, BK virus
NLSNCLNCLFHVLK

SEQ ID NO: 33111 - protein, 14 aa, BK virus
LSNCLNCLFHVLKA

SEQ ID NO: 33112 - protein, 14 aa, BK virus
SNCLNCLFHVLKAN

SEQ ID NO: 33113 - protein, 14 aa, BK virus
NCLNCLFHVLKANP

SEQ ID NO: 33114 - protein, 14 aa, BK virus
CLNCLFHVLKANPL

SEQ ID NO: 33115 - protein, 14 aa, BK virus
LNCLFHVLKANPLI

SEQ ID NO: 33116 - protein, 14 aa, BK virus
NCLFHVLKANPLIQ

SEQ ID NO: 33117 - protein, 14 aa, BK virus
CLFHVLKANPLIQL

SEQ ID NO: 33118 - protein, 14 aa, BK virus
LFHVLKANPLIQLL

SEQ ID NO: 33119 - protein, 14 aa, BK virus
FHVLKANPLIQLLS

SEQ ID NO: 33120 - protein, 14 aa, BK virus
HVLKANPLIQLLSL

SEQ ID NO: 33121 - protein, 14 aa, BK virus
VLKANPLIQLLSLL

SEQ ID NO: 33122 - protein, 14 aa, BK virus
LKANPLIQLLSLLH

SEQ ID NO: 33123 - protein, 14 aa, BK virus
KANPLIQLLSLLHL

SEQ ID NO: 33124 - protein, 14 aa, BK virus
ANPLIQLLSLLHLQ

SEQ ID NO: 33125 - protein, 14 aa, BK virus
NPLIQLLSLLHLQK

SEQ ID NO: 33126 - protein, 14 aa, BK virus
PLIQLLSLLHLQKQ

SEQ ID NO: 33127 - protein, 14 aa, BK virus
LIQLLSLLHLQKQP

SEQ ID NO: 33128 - protein, 14 aa, BK virus
IQLLSLLHLQKQPC

SEQ ID NO: 33129 - protein, 14 aa, BK virus
QLLSLLHLQKQPCT

SEQ ID NO: 33130 - protein, 14 aa, BK virus
LLSLLHLQKQPCTD

SEQ ID NO: 33131 - protein, 14 aa, BK virus
LSLLHLQKQPCTDL

SEQ ID NO: 33132 - protein, 14 aa, BK virus
LHLAQRLAFPWVGL

SEQ ID NO: 33133 - protein, 14 aa, BK virus
HLAQRLAFPWVGLH

SEQ ID NO: 33134 - protein, 14 aa, BK virus
LAQRLAFPWVGLHL

SEQ ID NO: 33135 - protein, 14 aa, BK virus
AQRLAFPWVGLHLR

SEQ ID NO: 33136 - protein, 14 aa, BK virus
QRLAFPWVGLHLRL

SEQ ID NO: 33137 - protein, 14 aa, BK virus
RLAFPWVGLHLRLY

SEQ ID NO: 33138 - protein, 14 aa, BK virus
LAFPWVGLHLRLYH

SEQ ID NO: 33139 - protein, 14 aa, BK virus
AFPWVGLHLRLYHH

SEQ ID NO: 33140 - protein, 14 aa, BK virus
FPWVGLHLRLYHHT

SEQ ID NO: 33141 - protein, 14 aa, BK virus
PWVGLHLRLYHHTN

SEQ ID NO: 33142 - protein, 14 aa, BK virus
WVGLHLRLYHHTNL

SEQ ID NO: 33143 - protein, 14 aa, BK virus
VGLHLRLYHHTNLI

SEQ ID NO: 33144 - protein, 14 aa, BK virus
GLHLRLYHHTNLIT

SEQ ID NO: 33145 - protein, 14 aa, BK virus
LHLRLYHHTNLITL

SEQ ID NO: 33146 - protein, 14 aa, BK virus
HLRLYHHTNLITLQ

SEQ ID NO: 33147 - protein, 14 aa, BK virus
LRLYHHTNLITLQL

SEQ ID NO: 33148 - protein, 14 aa, BK virus
RLYHHTNLITLQLV

SEQ ID NO: 33149 - protein, 14 aa, BK virus
LYHHTNLITLQLVL

SEQ ID NO: 33150 - protein, 14 aa, BK virus
YHHTNLITLQLVLF

SEQ ID NO: 33151 - protein, 14 aa, BK virus
HHTNLITLQLVLFF

SEQ ID NO: 33152 - protein, 14 aa, BK virus
HTNLITLQLVLFFH

SEQ ID NO: 33153 - protein, 14 aa, BK virus
TNLITLQLVLFFHY

SEQ ID NO: 33154 - protein, 14 aa, BK virus
NLITLQLVLFFHYQ

SEQ ID NO: 33155 - protein, 14 aa, BK virus
LITLQLVLFFHYQW

SEQ ID NO: 33156 - protein, 14 aa, BK virus
ITLQLVLFFHYQWD

SEQ ID NO: 33157 - protein, 14 aa, BK virus
TLQLVLFFHYQWDL

SEQ ID NO: 33158 - protein, 14 aa, BK virus
KQYSAKNQILQNPF

SEQ ID NO: 33159 - protein, 14 aa, BK virus
VANSAAKQHLPYIV

SEQ ID NO: 33160 - protein, 14 aa, BK virus
ANSAAKQHLPYIVL

SEQ ID NO: 33161 - protein, 14 aa, BK virus
NSAAKQHLPYIVLV

SEQ ID NO: 33162 - protein, 14 aa, BK virus
SAAKQHLPYIVLVQ

SEQ ID NO: 33163 - protein, 14 aa, BK virus
AAKQHLPYIVLVQH

SEQ ID NO: 33164 - protein, 14 aa, BK virus
AKQHLPYIVLVQHF

SEQ ID NO: 33165 - protein, 14 aa, BK virus
KQHLPYIVLVQHFH

SEQ ID NO: 33166 - protein, 14 aa, BK virus
QHLPYIVLVQHFHE

SEQ ID NO: 33167 - protein, 14 aa, BK virus
HLPYIVLVQHFHEL

SEQ ID NO: 33168 - protein, 14 aa, BK virus
LPYIVLVQHFHELQ

SEQ ID NO: 33169 - protein, 14 aa, BK virus
PYIVLVQHFHELQI

SEQ ID NO: 33170 - protein, 14 aa, BK virus
YIVLVQHFHELQIL

SEQ ID NO: 33171 - protein, 14 aa, BK virus
IVLVQHFHELQILN

SEQ ID NO: 33172 - protein, 14 aa, BK virus
VLVQHFHELQILNP

SEQ ID NO: 33173 - protein, 14 aa, BK virus
LVQHFHELQILNPF

SEQ ID NO: 33174 - protein, 14 aa, BK virus
VQHFHELQILNPFY

SEQ ID NO: 33175 - protein, 14 aa, BK virus
QHFHELQILNPFYL

SEQ ID NO: 33176 - protein, 14 aa, BK virus
HFHELQILNPFYLI

SEQ ID NO: 33177 - protein, 14 aa, BK virus
FHELQILNPFYLIY

SEQ ID NO: 33178 - protein, 14 aa, BK virus
HELQILNPFYLIYD

SEQ ID NO: 33179 - protein, 14 aa, BK virus
IFLLAFLPWSYEGY

SEQ ID NO: 33180 - protein, 14 aa, BK virus
FLLAFLPWSYEGYL

SEQ ID NO: 33181 - protein, 14 aa, BK virus
LLAFLPWSYEGYLL

SEQ ID NO: 33182 - protein, 14 aa, BK virus
LAFLPWSYEGYLLF

SEQ ID NO: 33183 - protein, 14 aa, BK virus
AFLPWSYEGYLLFF

SEQ ID NO: 33184 - protein, 14 aa, BK virus
LKLYLLLADKYFFD

SEQ ID NO: 33185 - protein, 14 aa, BK virus
KLYLLLADKYFFDF

SEQ ID NO: 33186 - protein, 14 aa, BK virus
LYLLLADKYFFDFY

SEQ ID NO: 33187 - protein, 14 aa, BK virus
YLLLADKYFFDFYF

SEQ ID NO: 33188 - protein, 14 aa, BK virus
LLLADKYFFDFYFL

SEQ ID NO: 33189 - protein, 14 aa, BK virus
LLADKYFFDFYFLQ

SEQ ID NO: 33190 - protein, 14 aa, BK virus
LADKYFFDFYFLQK

SEQ ID NO: 33191 - protein, 14 aa, BK virus
SDKAGLFSDTFYTP

SEQ ID NO: 33192 - protein, 14 aa, BK virus
DKAGLFSDTFYTPL

SEQ ID NO: 33193 - protein, 14 aa, BK virus
KAGLFSDTFYTPLH

SEQ ID NO: 33194 - protein, 14 aa, BK virus
AGLFSDTFYTPLHC

SEQ ID NO: 33195 - protein, 14 aa, BK virus
GLFSDTFYTPLHCI

SEQ ID NO: 33196 - protein, 14 aa, BK virus
LFSDTFYTPLHCIE

SEQ ID NO: 33197 - protein, 14 aa, BK virus
FSDTFYTPLHCIEI

SEQ ID NO: 33198 - protein, 14 aa, BK virus
SDTFYTPLHCIEIL

SEQ ID NO: 33199 - protein, 14 aa, BK virus
DTFYTPLHCIEILN

SEQ ID NO: 33200 - protein, 14 aa, BK virus
TFYTPLHCIEILNT

SEQ ID NO: 33201 - protein, 14 aa, BK virus
FYTPLHCIEILNTY

SEQ ID NO: 33202 - protein, 14 aa, BK virus
YTPLHCIEILNTYL

SEQ ID NO: 33203 - protein, 14 aa, BK virus
TPLHCIEILNTYLI

SEQ ID NO: 33204 - protein, 14 aa, BK virus
PLHCIEILNTYLII

SEQ ID NO: 33205 - protein, 14 aa, BK virus
LHCIEILNTYLIIK

SEQ ID NO: 33206 - protein, 14 aa, BK virus
HCIEILNTYLIIKT

SEQ ID NO: 33207 - protein, 14 aa, BK virus
CIEILNTYLIIKTH

SEQ ID NO: 33208 - protein, 14 aa, BK virus
IEILNTYLIIKTHP

SEQ ID NO: 33209 - protein, 14 aa, BK virus
EILNTYLIIKTHPH

SEQ ID NO: 33210 - protein, 14 aa, BK virus
ILNTYLIIKTHPHT

SEQ ID NO: 33211 - protein, 14 aa, BK virus
LNTYLIIKTHPHTL

SEQ ID NO: 33212 - protein, 14 aa, BK virus
NTYLIIKTHPHTLS

SEQ ID NO: 33213 - protein, 14 aa, BK virus
TYLIIKTHPHTLSL

SEQ ID NO: 33214 - protein, 14 aa, BK virus
YLIIKTHPHTLSLL

SEQ ID NO: 33215 - protein, 14 aa, BK virus
LIIKTHPHTLSLLH

SEQ ID NO: 33216 - protein, 14 aa, BK virus
IIKTHPHTLSLLHT

SEQ ID NO: 33217 - protein, 14 aa, BK virus
IKTHPHTLSLLHTQ

SEQ ID NO: 33218 - protein, 14 aa, BK virus
LISKTPALFLQALL

SEQ ID NO: 33219 - protein, 14 aa, BK virus
ISKTPALFLQALLG

SEQ ID NO: 33220 - protein, 14 aa, BK virus
GLLPFFFFWVVLSV

SEQ ID NO: 33221 - protein, 14 aa, BK virus
LLPFFFFWVVLSVE

SEQ ID NO: 33222 - protein, 14 aa, BK virus
LPFFFFWVVLSVEN

SEQ ID NO: 33223 - protein, 14 aa, BK virus
PFFFFWVVLSVENL

SEQ ID NO: 33224 - protein, 14 aa, BK virus
FFFFWVVLSVENLL

SEQ ID NO: 33225 - protein, 14 aa, BK virus
FFFWVVLSVENLLL

SEQ ID NO: 33226 - protein, 14 aa, BK virus
FFWVVLSVENLLLL

SEQ ID NO: 33227 - protein, 14 aa, BK virus
FWVVLSVENLLLLL

SEQ ID NO: 33228 - protein, 14 aa, BK virus
WVVLSVENLLLLLH

SEQ ID NO: 33229 - protein, 14 aa, BK virus
VVLSVENLLLLLHH

SEQ ID NO: 33230 - protein, 14 aa, BK virus
VLSVENLLLLLHHW

SEQ ID NO: 33231 - protein, 14 aa, BK virus
LSVENLLLLLHHWQ

SEQ ID NO: 33232 - protein, 14 aa, BK virus
SVENLLLLLHHWQT

SEQ ID NO: 33233 - protein, 14 aa, BK virus
VENLLLLLHHWQTY

SEQ ID NO: 33234 - protein, 14 aa, BK virus
ENLLLLLHHWQTYL

SEQ ID NO: 33235 - protein, 14 aa, BK virus
NLLLLLHHWQTYLH

SEQ ID NO: 33236 - protein, 14 aa, BK virus
LLLLLHHWQTYLHG

SEQ ID NO: 33237 - protein, 14 aa, BK virus
LLLLHHWQTYLHGK

SEQ ID NO: 33238 - protein, 14 aa, BK virus
LLLHHWQTYLHGKI

SEQ ID NO: 33239 - protein, 14 aa, BK virus
LLHHWQTYLHGKIN

SEQ ID NO: 33240 - protein, 14 aa, BK virus
LHHWQTYLHGKINL

SEQ ID NO: 33241 - protein, 14 aa, BK virus
HHWQTYLHGKINLH

SEQ ID NO: 33242 - protein, 14 aa, BK virus
HWQTYLHGKINLHP

SEQ ID NO: 33243 - protein, 14 aa, BK virus
WQTYLHGKINLHPI

SEQ ID NO: 33244 - protein, 14 aa, BK virus
QTYLHGKINLHPIF

SEQ ID NO: 33245 - protein, 14 aa, BK virus
TYLHGKINLHPIFH

SEQ ID NO: 33246 - protein, 14 aa, BK virus
RNSTRTPTLLFHRL

SEQ ID NO: 33247 - protein, 14 aa, BK virus
NSTRTPTLLFHRLA

SEQ ID NO: 33248 - protein, 14 aa, BK virus
STRTPTLLFHRLAP

SEQ ID NO: 33249 - protein, 14 aa, BK virus
TRTPTLLFHRLAPI

SEQ ID NO: 33250 - protein, 14 aa, BK virus
RTPTLLFHRLAPIK

SEQ ID NO: 33251 - protein, 14 aa, BK virus
TPTLLFHRLAPIKK

SEQ ID NO: 33252 - protein, 14 aa, BK virus
PTLLFHRLAPIKKI

SEQ ID NO: 33253 - protein, 14 aa, BK virus
TLLFHRLAPIKKII

SEQ ID NO: 33254 - protein, 14 aa, BK virus
LLFHRLAPIKKIIT

SEQ ID NO: 33255 - protein, 14 aa, BK virus
GLLIFYYLSKYKLV

SEQ ID NO: 33256 - protein, 14 aa, BK virus
LLIFYYLSKYKLVT

SEQ ID NO: 33257 - protein, 14 aa, BK virus
LIFYYLSKYKLVTL

SEQ ID NO: 33258 - protein, 14 aa, BK virus
IFYYLSKYKLVTLK

SEQ ID NO: 33259 - protein, 14 aa, BK virus
FYYLSKYKLVTLKL

SEQ ID NO: 33260 - protein, 14 aa, BK virus
ISEGSFSNYLDPPL

SEQ ID NO: 33261 - protein, 14 aa, BK virus
SEGSFSNYLDPPLQ

SEQ ID NO: 33262 - protein, 14 aa, BK virus
EGSFSNYLDPPLQS

SEQ ID NO: 33263 - protein, 14 aa, BK virus
GSFSNYLDPPLQSF

SEQ ID NO: 33264 - protein, 14 aa, BK virus
SFSNYLDPPLQSFF

SEQ ID NO: 33265 - protein, 14 aa, BK virus
FSNYLDPPLQSFFS

SEQ ID NO: 33266 - protein, 14 aa, BK virus
AKPLCEAVNAVAIY

SEQ ID NO: 33267 - protein, 14 aa, BK virus
KPLCEAVNAVAIYP

SEQ ID NO: 33268 - protein, 14 aa, BK virus
PLCEAVNAVAIYPN

SEQ ID NO: 33269 - protein, 14 aa, BK virus
LCEAVNAVAIYPNQ

SEQ ID NO: 33270 - protein, 14 aa, BK virus
CEAVNAVAIYPNQG

SEQ ID NO: 33271 - protein, 14 aa, BK virus
EAVNAVAIYPNQGL

SEQ ID NO: 33272 - protein, 14 aa, BK virus
AVNAVAIYPNQGLF

SEQ ID NO: 33273 - protein, 14 aa, BK virus
VNAVAIYPNQGLFS

SEQ ID NO: 33274 - protein, 14 aa, BK virus
HARAVHRRLFGTNR

SEQ ID NO: 33275 - protein, 14 aa, BK virus
ARAVHRRLFGTNRP

SEQ ID NO: 33276 - protein, 14 aa, BK virus
RAVHRRLFGTNRPF

SEQ ID NO: 33277 - protein, 14 aa, BK virus
AVHRRLFGTNRPFL

SEQ ID NO: 33278 - protein, 14 aa, BK virus
VHRRLFGTNRPFLA

SEQ ID NO: 33279 - protein, 14 aa, BK virus
HRRLFGTNRPFLAV

SEQ ID NO: 33280 - protein, 14 aa, BK virus
RRLFGTNRPFLAVQ

SEQ ID NO: 33281 - protein, 14 aa, BK virus
RLFGTNRPFLAVQG

SEQ ID NO: 33282 - protein, 14 aa, BK virus
LFGTNRPFLAVQGI

SEQ ID NO: 33283 - protein, 14 aa, BK virus
FGTNRPFLAVQGIW

SEQ ID NO: 33284 - protein, 14 aa, BK virus
GTNRPFLAVQGIWA

SEQ ID NO: 33285 - protein, 14 aa, BK virus
TNRPFLAVQGIWAK

SEQ ID NO: 33286 - protein, 14 aa, BK virus
NRPFLAVQGIWAKR

SEQ ID NO: 33287 - protein, 14 aa, BK virus
RPFLAVQGIWAKRK

SEQ ID NO: 33288 - protein, 14 aa, BK virus
PFLAVQGIWAKRKI

SEQ ID NO: 33289 - protein, 14 aa, BK virus
FLAVQGIWAKRKIS

SEQ ID NO: 33290 - protein, 14 aa, BK virus
LAVQGIWAKRKIST

SEQ ID NO: 33291 - protein, 14 aa, BK virus
AVQGIWAKRKISTN

SEQ ID NO: 33292 - protein, 14 aa, BK virus
VQGIWAKRKISTNL

SEQ ID NO: 33293 - protein, 14 aa, BK virus
ATPGSKIRLMSYLY

SEQ ID NO: 33294 - protein, 14 aa, BK virus
TPGSKIRLMSYLYI

SEQ ID NO: 33295 - protein, 14 aa, BK virus
PGSKIRLMSYLYIL

SEQ ID NO: 33296 - protein, 14 aa, BK virus
GSKIRLMSYLYILL

SEQ ID NO: 33297 - protein, 14 aa, BK virus
SKIRLMSYLYILLH

SEQ ID NO: 33298 - protein, 14 aa, BK virus
KIRLMSYLYILLHF

SEQ ID NO: 33299 - protein, 14 aa, BK virus
IRLMSYLYILLHFF

SEQ ID NO: 33300 - protein, 14 aa, BK virus
RLMSYLYILLHFFI

SEQ ID NO: 33301 - protein, 14 aa, BK virus
LMSYLYILLHFFIQ

SEQ ID NO: 33302 - protein, 14 aa, BK virus
MSYLYILLHFFIQS

SEQ ID NO: 33303 - protein, 14 aa, BK virus
SYLYILLHFFIQSI

SEQ ID NO: 33304 - protein, 14 aa, BK virus
YLYILLHFFIQSIH

SEQ ID NO: 33305 - protein, 14 aa, BK virus
LYILLHFFIQSIHS

SEQ ID NO: 33306 - protein, 14 aa, BK virus
YILLHFFIQSIHSL

SEQ ID NO: 33307 - protein, 14 aa, BK virus
ILLHFFIQSIHSLH

SEQ ID NO: 33308 - protein, 14 aa, BK virus
LLHFFIQSIHSLHF

SEQ ID NO: 33309 - protein, 14 aa, BK virus
LHFFIQSIHSLHFI

SEQ ID NO: 33310 - protein, 14 aa, BK virus
HFFIQSIHSLHFIL

SEQ ID NO: 33311 - protein, 14 aa, BK virus
FFIQSIHSLHFILV

SEQ ID NO: 33312 - protein, 14 aa, BK virus
FIQSIHSLHFILVA

SEQ ID NO: 33313 - protein, 14 aa, BK virus
IQSIHSLHFILVAP

SEQ ID NO: 33314 - protein, 14 aa, BK virus
QSIHSLHFILVAPF

SEQ ID NO: 33315 - protein, 14 aa, BK virus
SIHSLHFILVAPFV

SEQ ID NO: 33316 - protein, 14 aa, BK virus
IHSLHFILVAPFVR

SEQ ID NO: 33317 - protein, 14 aa, BK virus
HSLHFILVAPFVRV

SEQ ID NO: 33318 - protein, 14 aa, BK virus
SLHFILVAPFVRVK

SEQ ID NO: 33319 - protein, 14 aa, BK virus
LHFILVAPFVRVKF

SEQ ID NO: 33320 - protein, 14 aa, BK virus
HFILVAPFVRVKFL

SEQ ID NO: 33321 - protein, 14 aa, BK virus
FILVAPFVRVKFLT

SEQ ID NO: 33322 - protein, 15 aa, BK virus
ASEKASTPLLLERKG

SEQ ID NO: 33323 - protein, 15 aa, BK virus
SEKASTPLLLERKGG

SEQ ID NO: 33324 - protein, 15 aa, BK virus
EKASTPLLLERKGGG

SEQ ID NO: 33325 - protein, 15 aa, BK virus
KASTPLLLERKGGGR

SEQ ID NO: 33326 - protein, 15 aa, BK virus
ASTPLLLERKGGGRG

SEQ ID NO: 33327 - protein, 15 aa, BK virus
STPLLLERKGGGRGG

SEQ ID NO: 33328 - protein, 15 aa, BK virus
TPLLLERKGGGRGGL

SEQ ID NO: 33329 - protein, 15 aa, BK virus
PLLLERKGGGRGGLG

SEQ ID NO: 33330 - protein, 15 aa, BK virus
LLLERKGGGRGGLGL

SEQ ID NO: 33331 - protein, 15 aa, BK virus
LLERKGGGRGGLGLL

SEQ ID NO: 33332 - protein, 15 aa, BK virus
LERKGGGRGGLGLLY

SEQ ID NO: 33333 - protein, 15 aa, BK virus
ERKGGGRGGLGLLYI

SEQ ID NO: 33334 - protein, 15 aa, BK virus
RKGGGRGGLGLLYII

SEQ ID NO: 33335 - protein, 15 aa, BK virus
KGGGRGGLGLLYIIK

SEQ ID NO: 33336 - protein, 15 aa, BK virus
GGGRGGLGLLYIIKK

SEQ ID NO: 33337 - protein, 15 aa, BK virus
GGRGGLGLLYIIKKK

SEQ ID NO: 33338 - protein, 15 aa, BK virus
GRGGLGLLYIIKKKA

SEQ ID NO: 33339 - protein, 15 aa, BK virus
RGGLGLLYIIKKKAT

SEQ ID NO: 33340 - protein, 15 aa, BK virus
GGLGLLYIIKKKATG

SEQ ID NO: 33341 - protein, 15 aa, BK virus
GLGLLYIIKKKATGR

SEQ ID NO: 33342 - protein, 15 aa, BK virus
LGLLYIIKKKATGRS

SEQ ID NO: 33343 - protein, 15 aa, BK virus
GLLYIIKKKATGRSC

SEQ ID NO: 33344 - protein, 15 aa, BK virus
LLYIIKKKATGRSCL

SEQ ID NO: 33345 - protein, 15 aa, BK virus
LYIIKKKATGRSCLP

SEQ ID NO: 33346 - protein, 15 aa, BK virus
YIIKKKATGRSCLPM

SEQ ID NO: 33347 - protein, 15 aa, BK virus
IIKKKATGRSCLPME

SEQ ID NO: 33348 - protein, 15 aa, BK virus
IKKKATGRSCLPMEC

SEQ ID NO: 33349 - protein, 15 aa, BK virus
KKKATGRSCLPMECS

SEQ ID NO: 33350 - protein, 15 aa, BK virus
KKATGRSCLPMECSQ

SEQ ID NO: 33351 - protein, 15 aa, BK virus
KATGRSCLPMECSQT

SEQ ID NO: 33352 - protein, 15 aa, BK virus
ATGRSCLPMECSQTM

SEQ ID NO: 33353 - protein, 15 aa, BK virus
TGRSCLPMECSQTMT

SEQ ID NO: 33354 - protein, 15 aa, BK virus
GRSCLPMECSQTMTS

SEQ ID NO: 33355 - protein, 15 aa, BK virus
RSCLPMECSQTMTSG

SEQ ID NO: 33356 - protein, 15 aa, BK virus
SCLPMECSQTMTSGR

SEQ ID NO: 33357 - protein, 15 aa, BK virus
CLPMECSQTMTSGRK

SEQ ID NO: 33358 - protein, 15 aa, BK virus
LPMECSQTMTSGRKV

SEQ ID NO: 33359 - protein, 15 aa, BK virus
PMECSQTMTSGRKVH

SEQ ID NO: 33360 - protein, 15 aa, BK virus
MECSQTMTSGRKVHD

SEQ ID NO: 33361 - protein, 15 aa, BK virus
ECSQTMTSGRKVHDS

SEQ ID NO: 33362 - protein, 15 aa, BK virus
CSQTMTSGRKVHDSQ

SEQ ID NO: 33363 - protein, 15 aa, BK virus
SQTMTSGRKVHDSQG

SEQ ID NO: 33364 - protein, 15 aa, BK virus
QTMTSGRKVHDSQGN

SEQ ID NO: 33365 - protein, 15 aa, BK virus
TMTSGRKVHDSQGNA

SEQ ID NO: 33366 - protein, 15 aa, BK virus
MTSGRKVHDSQGNAA

SEQ ID NO: 33367 - protein, 15 aa, BK virus
TSGRKVHDSQGNAAK

SEQ ID NO: 33368 - protein, 15 aa, BK virus
SGRKVHDSQGNAAKP

SEQ ID NO: 33369 - protein, 15 aa, BK virus
PQEGKCMTHREELLT

SEQ ID NO: 33370 - protein, 15 aa, BK virus
QEGKCMTHREELLTH

SEQ ID NO: 33371 - protein, 15 aa, BK virus
EGKCMTHREELLTHG

SEQ ID NO: 33372 - protein, 15 aa, BK virus
GKCMTHREELLTHGM

SEQ ID NO: 33373 - protein, 15 aa, BK virus
KCMTHREELLTHGMQ

SEQ ID NO: 33374 - protein, 15 aa, BK virus
CMTHREELLTHGMQP

SEQ ID NO: 33375 - protein, 15 aa, BK virus
MTHREELLTHGMQPN

SEQ ID NO: 33376 - protein, 15 aa, BK virus
THREELLTHGMQPNH

SEQ ID NO: 33377 - protein, 15 aa, BK virus
HREELLTHGMQPNHD

SEQ ID NO: 33378 - protein, 15 aa, BK virus
REELLTHGMQPNHDL

SEQ ID NO: 33379 - protein, 15 aa, BK virus
EELLTHGMQPNHDLR

SEQ ID NO: 33380 - protein, 15 aa, BK virus
ELLTHGMQPNHDLRK

SEQ ID NO: 33381 - protein, 15 aa, BK virus
LLTHGMQPNHDLRKE

SEQ ID NO: 33382 - protein, 15 aa, BK virus
LTHGMQPNHDLRKES

SEQ ID NO: 33383 - protein, 15 aa, BK virus
THGMQPNHDLRKESA

SEQ ID NO: 33384 - protein, 15 aa, BK virus
QTCFASLGILALSPV

SEQ ID NO: 33385 - protein, 15 aa, BK virus
TCFASLGILALSPVK

SEQ ID NO: 33386 - protein, 15 aa, BK virus
CFASLGILALSPVKL

SEQ ID NO: 33387 - protein, 15 aa, BK virus
FASLGILALSPVKLD

SEQ ID NO: 33388 - protein, 15 aa, BK virus
ASLGILALSPVKLDK

SEQ ID NO: 33389 - protein, 15 aa, BK virus
SLGILALSPVKLDKG

SEQ ID NO: 33390 - protein, 15 aa, BK virus
LGILALSPVKLDKGH

SEQ ID NO: 33391 - protein, 15 aa, BK virus
GILALSPVKLDKGHG

SEQ ID NO: 33392 - protein, 15 aa, BK virus
ILALSPVKLDKGHGS

SEQ ID NO: 33393 - protein, 15 aa, BK virus
LALSPVKLDKGHGSA

SEQ ID NO: 33394 - protein, 15 aa, BK virus
ALSPVKLDKGHGSAP

SEQ ID NO: 33395 - protein, 15 aa, BK virus
LSPVKLDKGHGSAPA

SEQ ID NO: 33396 - protein, 15 aa, BK virus
SPVKLDKGHGSAPAV

SEQ ID NO: 33397 - protein, 15 aa, BK virus
PVKLDKGHGSAPAVT

SEQ ID NO: 33398 - protein, 15 aa, BK virus
VKLDKGHGSAPAVTT

SEQ ID NO: 33399 - protein, 15 aa, BK virus
KLDKGHGSAPAVTTS

SEQ ID NO: 33400 - protein, 15 aa, BK virus
LDKGHGSAPAVTTSF

SEQ ID NO: 33401 - protein, 15 aa, BK virus
DKGHGSAPAVTTSFS

SEQ ID NO: 33402 - protein, 15 aa, BK virus
KGHGSAPAVTTSFSE

SEQ ID NO: 33403 - protein, 15 aa, BK virus
GHGSAPAVTTSFSES

SEQ ID NO: 33404 - protein, 15 aa, BK virus
HGSAPAVTTSFSESW

SEQ ID NO: 33405 - protein, 15 aa, BK virus
NLDWNKKKSSEDFYF

SEQ ID NO: 33406 - protein, 15 aa, BK virus
LDWNKKKSSEDFYFY

SEQ ID NO: 33407 - protein, 15 aa, BK virus
DWNKKKSSEDFYFYF

SEQ ID NO: 33408 - protein, 15 aa, BK virus
WNKKKSSEDFYFYFR

SEQ ID NO: 33409 - protein, 15 aa, BK virus
NKKKSSEDFYFYFRA

SEQ ID NO: 33410 - protein, 15 aa, BK virus
KKKSSEDFYFYFRAF

SEQ ID NO: 33411 - protein, 15 aa, BK virus
KKSSEDFYFYFRAFA

SEQ ID NO: 33412 - protein, 15 aa, BK virus
KSSEDFYFYFRAFAG

SEQ ID NO: 33413 - protein, 15 aa, BK virus
SSEDFYFYFRAFAGI

SEQ ID NO: 33414 - protein, 15 aa, BK virus
SEDFYFYFRAFAGIL

SEQ ID NO: 33415 - protein, 15 aa, BK virus
RQCRREKQKYHCFTC

SEQ ID NO: 33416 - protein, 15 aa, BK virus
QCRREKQKYHCFTCC

SEQ ID NO: 33417 - protein, 15 aa, BK virus
CRREKQKYHCFTCCK

SEQ ID NO: 33418 - protein, 15 aa, BK virus
RREKQKYHCFTCCKR

SEQ ID NO: 33419 - protein, 15 aa, BK virus
REKQKYHCFTCCKRL

SEQ ID NO: 33420 - protein, 15 aa, BK virus
EKQKYHCFTCCKRLC

SEQ ID NO: 33421 - protein, 15 aa, BK virus
KQKYHCFTCCKRLCK

SEQ ID NO: 33422 - protein, 15 aa, BK virus
QKYHCFTCCKRLCKR

SEQ ID NO: 33423 - protein, 15 aa, BK virus
KYHCFTCCKRLCKRL

SEQ ID NO: 33424 - protein, 15 aa, BK virus
YHCFTCCKRLCKRLL

SEQ ID NO: 33425 - protein, 15 aa, BK virus
HCFTCCKRLCKRLLG

SEQ ID NO: 33426 - protein, 15 aa, BK virus
CFTCCKRLCKRLLGK

SEQ ID NO: 33427 - protein, 15 aa, BK virus
SLFFCISRFMGAALA

SEQ ID NO: 33428 - protein, 15 aa, BK virus
LFFCISRFMGAALAL

SEQ ID NO: 33429 - protein, 15 aa, BK virus
FFCISRFMGAALALL

SEQ ID NO: 33430 - protein, 15 aa, BK virus
FCISRFMGAALALLG

SEQ ID NO: 33431 - protein, 15 aa, BK virus
CISRFMGAALALLGD

SEQ ID NO: 33432 - protein, 15 aa, BK virus
ISRFMGAALALLGDL

SEQ ID NO: 33433 - protein, 15 aa, BK virus
SRFMGAALALLGDLV

SEQ ID NO: 33434 - protein, 15 aa, BK virus
RFMGAALALLGDLVA

SEQ ID NO: 33435 - protein, 15 aa, BK virus
FMGAALALLGDLVAS

SEQ ID NO: 33436 - protein, 15 aa, BK virus
MGAALALLGDLVASV

SEQ ID NO: 33437 - protein, 15 aa, BK virus
GAALALLGDLVASVS

SEQ ID NO: 33438 - protein, 15 aa, BK virus
AALALLGDLVASVSE

SEQ ID NO: 33439 - protein, 15 aa, BK virus
ALALLGDLVASVSEA

SEQ ID NO: 33440 - protein, 15 aa, BK virus
LALLGDLVASVSEAA

SEQ ID NO: 33441 - protein, 15 aa, BK virus
ALLGDLVASVSEAAA

SEQ ID NO: 33442 - protein, 15 aa, BK virus
LLGDLVASVSEAAAA

SEQ ID NO: 33443 - protein, 15 aa, BK virus
LGDLVASVSEAAAAT

SEQ ID NO: 33444 - protein, 15 aa, BK virus
GDLVASVSEAAAATG

SEQ ID NO: 33445 - protein, 15 aa, BK virus
DLVASVSEAAAATGF

SEQ ID NO: 33446 - protein, 15 aa, BK virus
LVASVSEAAAATGFS

SEQ ID NO: 33447 - protein, 15 aa, BK virus
VASVSEAAAATGFSV

SEQ ID NO: 33448 - protein, 15 aa, BK virus
ASVSEAAAATGFSVA

SEQ ID NO: 33449 - protein, 15 aa, BK virus
SVSEAAAATGFSVAE

SEQ ID NO: 33450 - protein, 15 aa, BK virus
VSEAAAATGFSVAEI

SEQ ID NO: 33451 - protein, 15 aa, BK virus
SEAAAATGFSVAEIA

SEQ ID NO: 33452 - protein, 15 aa, BK virus
EAAAATGFSVAEIAA

SEQ ID NO: 33453 - protein, 15 aa, BK virus
AAAATGFSVAEIAAG

SEQ ID NO: 33454 - protein, 15 aa, BK virus
AAATGFSVAEIAAGE

SEQ ID NO: 33455 - protein, 15 aa, BK virus
AATGFSVAEIAAGEA

SEQ ID NO: 33456 - protein, 15 aa, BK virus
ATGFSVAEIAAGEAA

SEQ ID NO: 33457 - protein, 15 aa, BK virus
TGFSVAEIAAGEAAA

SEQ ID NO: 33458 - protein, 15 aa, BK virus
GFSVAEIAAGEAAAA

SEQ ID NO: 33459 - protein, 15 aa, BK virus
FSVAEIAAGEAAAAI

SEQ ID NO: 33460 - protein, 15 aa, BK virus
SVAEIAAGEAAAAIE

SEQ ID NO: 33461 - protein, 15 aa, BK virus
VAEIAAGEAAAAIEV

SEQ ID NO: 33462 - protein, 15 aa, BK virus
AEIAAGEAAAAIEVQ

SEQ ID NO: 33463 - protein, 15 aa, BK virus
EIAAGEAAAAIEVQI

SEQ ID NO: 33464 - protein, 15 aa, BK virus
IAAGEAAAAIEVQIA

SEQ ID NO: 33465 - protein, 15 aa, BK virus
AAGEAAAAIEVQIAS

SEQ ID NO: 33466 - protein, 15 aa, BK virus
AGEAAAAIEVQIASL

SEQ ID NO: 33467 - protein, 15 aa, BK virus
GEAAAAIEVQIASLA

SEQ ID NO: 33468 - protein, 15 aa, BK virus
EAAAAIEVQIASLAT

SEQ ID NO: 33469 - protein, 15 aa, BK virus
AAAAIEVQIASLATV

SEQ ID NO: 33470 - protein, 15 aa, BK virus
AAAIEVQIASLATVE

SEQ ID NO: 33471 - protein, 15 aa, BK virus
AAIEVQIASLATVEG

SEQ ID NO: 33472 - protein, 15 aa, BK virus
AIEVQIASLATVEGI

SEQ ID NO: 33473 - protein, 15 aa, BK virus
IEVQIASLATVEGIT

SEQ ID NO: 33474 - protein, 15 aa, BK virus
EVQIASLATVEGITS

SEQ ID NO: 33475 - protein, 15 aa, BK virus
VQIASLATVEGITST

SEQ ID NO: 33476 - protein, 15 aa, BK virus
QIASLATVEGITSTS

SEQ ID NO: 33477 - protein, 15 aa, BK virus
IASLATVEGITSTSE

SEQ ID NO: 33478 - protein, 15 aa, BK virus
ASLATVEGITSTSEA

SEQ ID NO: 33479 - protein, 15 aa, BK virus
SLATVEGITSTSEAI

SEQ ID NO: 33480 - protein, 15 aa, BK virus
LATVEGITSTSEAIA

SEQ ID NO: 33481 - protein, 15 aa, BK virus
ATVEGITSTSEAIAA

SEQ ID NO: 33482 - protein, 15 aa, BK virus
TVEGITSTSEAIAAI

SEQ ID NO: 33483 - protein, 15 aa, BK virus
VEGITSTSEAIAAIG

SEQ ID NO: 33484 - protein, 15 aa, BK virus
EGITSTSEAIAAIGL

SEQ ID NO: 33485 - protein, 15 aa, BK virus
GITSTSEAIAAIGLT

SEQ ID NO: 33486 - protein, 15 aa, BK virus
ITSTSEAIAAIGLTP

SEQ ID NO: 33487 - protein, 15 aa, BK virus
TSTSEAIAAIGLTPQ

SEQ ID NO: 33488 - protein, 15 aa, BK virus
STSEAIAAIGLTPQT

SEQ ID NO: 33489 - protein, 15 aa, BK virus
TSEAIAAIGLTPQTY

SEQ ID NO: 33490 - protein, 15 aa, BK virus
SEAIAAIGLTPQTYA

SEQ ID NO: 33491 - protein, 15 aa, BK virus
EAIAAIGLTPQTYAV

SEQ ID NO: 33492 - protein, 15 aa, BK virus
AIAAIGLTPQTYAVI

SEQ ID NO: 33493 - protein, 15 aa, BK virus
IAAIGLTPQTYAVIA

SEQ ID NO: 33494 - protein, 15 aa, BK virus
AAIGLTPQTYAVIAG

SEQ ID NO: 33495 - protein, 15 aa, BK virus
AIGLTPQTYAVIAGA

SEQ ID NO: 33496 - protein, 15 aa, BK virus
IGLTPQTYAVIAGAP

SEQ ID NO: 33497 - protein, 15 aa, BK virus
GLTPQTYAVIAGAPG

SEQ ID NO: 33498 - protein, 15 aa, BK virus
LTPQTYAVIAGAPGA

SEQ ID NO: 33499 - protein, 15 aa, BK virus
TPQTYAVIAGAPGAI

SEQ ID NO: 33500 - protein, 15 aa, BK virus
PQTYAVIAGAPGAIA

SEQ ID NO: 33501 - protein, 15 aa, BK virus
QTYAVIAGAPGAIAG

SEQ ID NO: 33502 - protein, 15 aa, BK virus
TYAVIAGAPGAIAGF

SEQ ID NO: 33503 - protein, 15 aa, BK virus
YAVIAGAPGAIAGFA

SEQ ID NO: 33504 - protein, 15 aa, BK virus
AVIAGAPGAIAGFAA

SEQ ID NO: 33505 - protein, 15 aa, BK virus
VIAGAPGAIAGFAAL

SEQ ID NO: 33506 - protein, 15 aa, BK virus
IAGAPGAIAGFAALI

SEQ ID NO: 33507 - protein, 15 aa, BK virus
AGAPGAIAGFAALIQ

SEQ ID NO: 33508 - protein, 15 aa, BK virus
GAPGAIAGFAALIQT

SEQ ID NO: 33509 - protein, 15 aa, BK virus
APGAIAGFAALIQTV

SEQ ID NO: 33510 - protein, 15 aa, BK virus
PGAIAGFAALIQTVS

SEQ ID NO: 33511 - protein, 15 aa, BK virus
GAIAGFAALIQTVSG

SEQ ID NO: 33512 - protein, 15 aa, BK virus
AIAGFAALIQTVSGI

SEQ ID NO: 33513 - protein, 15 aa, BK virus
IAGFAALIQTVSGIS

SEQ ID NO: 33514 - protein, 15 aa, BK virus
AGFAALIQTVSGISS

SEQ ID NO: 33515 - protein, 15 aa, BK virus
GFAALIQTVSGISSL

SEQ ID NO: 33516 - protein, 15 aa, BK virus
FAALIQTVSGISSLA

SEQ ID NO: 33517 - protein, 15 aa, BK virus
AALIQTVSGISSLAQ

SEQ ID NO: 33518 - protein, 15 aa, BK virus
ALIQTVSGISSLAQV

SEQ ID NO: 33519 - protein, 15 aa, BK virus
LIQTVSGISSLAQVG

SEQ ID NO: 33520 - protein, 15 aa, BK virus
IQTVSGISSLAQVGY

SEQ ID NO: 33521 - protein, 15 aa, BK virus
QTVSGISSLAQVGYK

SEQ ID NO: 33522 - protein, 15 aa, BK virus
TVSGISSLAQVGYKF

SEQ ID NO: 33523 - protein, 15 aa, BK virus
VSGISSLAQVGYKFF

SEQ ID NO: 33524 - protein, 15 aa, BK virus
SGISSLAQVGYKFFD

SEQ ID NO: 33525 - protein, 15 aa, BK virus
GISSLAQVGYKFFDD

SEQ ID NO: 33526 - protein, 15 aa, BK virus
ISSLAQVGYKFFDDW

SEQ ID NO: 33527 - protein, 15 aa, BK virus
SSLAQVGYKFFDDWD

SEQ ID NO: 33528 - protein, 15 aa, BK virus
SLAQVGYKFFDDWDH

SEQ ID NO: 33529 - protein, 15 aa, BK virus
LAQVGYKFFDDWDHK

SEQ ID NO: 33530 - protein, 15 aa, BK virus
AQVGYKFFDDWDHKV

SEQ ID NO: 33531 - protein, 15 aa, BK virus
QVGYKFFDDWDHKVS

SEQ ID NO: 33532 - protein, 15 aa, BK virus
VGYKFFDDWDHKVST

SEQ ID NO: 33533 - protein, 15 aa, BK virus
GYKFFDDWDHKVSTV

SEQ ID NO: 33534 - protein, 15 aa, BK virus
YKFFDDWDHKVSTVG

SEQ ID NO: 33535 - protein, 15 aa, BK virus
KFFDDWDHKVSTVGL

SEQ ID NO: 33536 - protein, 15 aa, BK virus
FFDDWDHKVSTVGLY

SEQ ID NO: 33537 - protein, 15 aa, BK virus
FDDWDHKVSTVGLYQ

SEQ ID NO: 33538 - protein, 15 aa, BK virus
DDWDHKVSTVGLYQQ

SEQ ID NO: 33539 - protein, 15 aa, BK virus
DWDHKVSTVGLYQQS

SEQ ID NO: 33540 - protein, 15 aa, BK virus
WDHKVSTVGLYQQSG

SEQ ID NO: 33541 - protein, 15 aa, BK virus
DHKVSTVGLYQQSGM

SEQ ID NO: 33542 - protein, 15 aa, BK virus
HKVSTVGLYQQSGMA

SEQ ID NO: 33543 - protein, 15 aa, BK virus
KVSTVGLYQQSGMAL

SEQ ID NO: 33544 - protein, 15 aa, BK virus
VSTVGLYQQSGMALE

SEQ ID NO: 33545 - protein, 15 aa, BK virus
STVGLYQQSGMALEL

SEQ ID NO: 33546 - protein, 15 aa, BK virus
TVGLYQQSGMALELF

SEQ ID NO: 33547 - protein, 15 aa, BK virus
VGLYQQSGMALELFN

SEQ ID NO: 33548 - protein, 15 aa, BK virus
GLYQQSGMALELFNP

SEQ ID NO: 33549 - protein, 15 aa, BK virus
LYQQSGMALELFNPD

SEQ ID NO: 33550 - protein, 15 aa, BK virus
YQQSGMALELFNPDE

SEQ ID NO: 33551 - protein, 15 aa, BK virus
QQSGMALELFNPDEY

SEQ ID NO: 33552 - protein, 15 aa, BK virus
QSGMALELFNPDEYY

SEQ ID NO: 33553 - protein, 15 aa, BK virus
SGMALELFNPDEYYD

SEQ ID NO: 33554 - protein, 15 aa, BK virus
GMALELFNPDEYYDI

SEQ ID NO: 33555 - protein, 15 aa, BK virus
MALELFNPDEYYDIL

SEQ ID NO: 33556 - protein, 15 aa, BK virus
ALELFNPDEYYDILF

SEQ ID NO: 33557 - protein, 15 aa, BK virus
LELFNPDEYYDILFP

SEQ ID NO: 33558 - protein, 15 aa, BK virus
ELFNPDEYYDILFPG

SEQ ID NO: 33559 - protein, 15 aa, BK virus
LFNPDEYYDILFPGV

SEQ ID NO: 33560 - protein, 15 aa, BK virus
FNPDEYYDILFPGVN

SEQ ID NO: 33561 - protein, 15 aa, BK virus
NPDEYYDILFPGVNT

SEQ ID NO: 33562 - protein, 15 aa, BK virus
PDEYYDILFPGVNTF

SEQ ID NO: 33563 - protein, 15 aa, BK virus
DEYYDILFPGVNTFV

SEQ ID NO: 33564 - protein, 15 aa, BK virus
EYYDILFPGVNTFVN

SEQ ID NO: 33565 - protein, 15 aa, BK virus
YYDILFPGVNTFVNN

SEQ ID NO: 33566 - protein, 15 aa, BK virus
YDILFPGVNTFVNNI

SEQ ID NO: 33567 - protein, 15 aa, BK virus
DILFPGVNTFVNNIQ

SEQ ID NO: 33568 - protein, 15 aa, BK virus
ILFPGVNTFVNNIQY

SEQ ID NO: 33569 - protein, 15 aa, BK virus
LFPGVNTFVNNIQYL

SEQ ID NO: 33570 - protein, 15 aa, BK virus
FPGVNTFVNNIQYLD

SEQ ID NO: 33571 - protein, 15 aa, BK virus
PGVNTFVNNIQYLDP

SEQ ID NO: 33572 - protein, 15 aa, BK virus
GVNTFVNNIQYLDPR

SEQ ID NO: 33573 - protein, 15 aa, BK virus
VNTFVNNIQYLDPRH

SEQ ID NO: 33574 - protein, 15 aa, BK virus
NTFVNNIQYLDPRHW

SEQ ID NO: 33575 - protein, 15 aa, BK virus
TFVNNIQYLDPRHWG

SEQ ID NO: 33576 - protein, 15 aa, BK virus
FVNNIQYLDPRHWGP

SEQ ID NO: 33577 - protein, 15 aa, BK virus
VNNIQYLDPRHWGPS

SEQ ID NO: 33578 - protein, 15 aa, BK virus
NNIQYLDPRHWGPSL

SEQ ID NO: 33579 - protein, 15 aa, BK virus
NIQYLDPRHWGPSLF

SEQ ID NO: 33580 - protein, 15 aa, BK virus
IQYLDPRHWGPSLFA

SEQ ID NO: 33581 - protein, 15 aa, BK virus
QYLDPRHWGPSLFAT

SEQ ID NO: 33582 - protein, 15 aa, BK virus
YLDPRHWGPSLFATI

SEQ ID NO: 33583 - protein, 15 aa, BK virus
LDPRHWGPSLFATIS

SEQ ID NO: 33584 - protein, 15 aa, BK virus
DPRHWGPSLFATISQ

SEQ ID NO: 33585 - protein, 15 aa, BK virus
PRHWGPSLFATISQA

SEQ ID NO: 33586 - protein, 15 aa, BK virus
RHWGPSLFATISQAL

SEQ ID NO: 33587 - protein, 15 aa, BK virus
HWGPSLFATISQALW

SEQ ID NO: 33588 - protein, 15 aa, BK virus
WGPSLFATISQALWH

SEQ ID NO: 33589 - protein, 15 aa, BK virus
GPSLFATISQALWHV

SEQ ID NO: 33590 - protein, 15 aa, BK virus
PSLFATISQALWHVI

SEQ ID NO: 33591 - protein, 15 aa, BK virus
SLFATISQALWHVIR

SEQ ID NO: 33592 - protein, 15 aa, BK virus
LFATISQALWHVIRD

SEQ ID NO: 33593 - protein, 15 aa, BK virus
FATISQALWHVIRDD

SEQ ID NO: 33594 - protein, 15 aa, BK virus
ATISQALWHVIRDDI

SEQ ID NO: 33595 - protein, 15 aa, BK virus
TISQALWHVIRDDIP

SEQ ID NO: 33596 - protein, 15 aa, BK virus
ISQALWHVIRDDIPS

SEQ ID NO: 33597 - protein, 15 aa, BK virus
SQALWHVIRDDIPSI

SEQ ID NO: 33598 - protein, 15 aa, BK virus
QALWHVIRDDIPSIT

SEQ ID NO: 33599 - protein, 15 aa, BK virus
ALWHVIRDDIPSITS

SEQ ID NO: 33600 - protein, 15 aa, BK virus
LWHVIRDDIPSITSQ

SEQ ID NO: 33601 - protein, 15 aa, BK virus
WHVIRDDIPSITSQE

SEQ ID NO: 33602 - protein, 15 aa, BK virus
HVIRDDIPSITSQEL

SEQ ID NO: 33603 - protein, 15 aa, BK virus
VIRDDIPSITSQELQ

SEQ ID NO: 33604 - protein, 15 aa, BK virus
IRDDIPSITSQELQR

SEQ ID NO: 33605 - protein, 15 aa, BK virus
RDDIPSITSQELQRR

SEQ ID NO: 33606 - protein, 15 aa, BK virus
DDIPSITSQELQRRT

SEQ ID NO: 33607 - protein, 15 aa, BK virus
DIPSITSQELQRRTE

SEQ ID NO: 33608 - protein, 15 aa, BK virus
IPSITSQELQRRTER

SEQ ID NO: 33609 - protein, 15 aa, BK virus
PSITSQELQRRTERF

SEQ ID NO: 33610 - protein, 15 aa, BK virus
SITSQELQRRTERFF

SEQ ID NO: 33611 - protein, 15 aa, BK virus
ITSQELQRRTERFFR

SEQ ID NO: 33612 - protein, 15 aa, BK virus
TSQELQRRTERFFRD

SEQ ID NO: 33613 - protein, 15 aa, BK virus
SQELQRRTERFFRDS

SEQ ID NO: 33614 - protein, 15 aa, BK virus
QELQRRTERFFRDSL

SEQ ID NO: 33615 - protein, 15 aa, BK virus
ELQRRTERFFRDSLA

SEQ ID NO: 33616 - protein, 15 aa, BK virus
LQRRTERFFRDSLAR

SEQ ID NO: 33617 - protein, 15 aa, BK virus
QRRTERFFRDSLARF

SEQ ID NO: 33618 - protein, 15 aa, BK virus
RRTERFFRDSLARFL

SEQ ID NO: 33619 - protein, 15 aa, BK virus
RTERFFRDSLARFLE

SEQ ID NO: 33620 - protein, 15 aa, BK virus
TERFFRDSLARFLEE

SEQ ID NO: 33621 - protein, 15 aa, BK virus
ERFFRDSLARFLEET

SEQ ID NO: 33622 - protein, 15 aa, BK virus
RFFRDSLARFLEETT

SEQ ID NO: 33623 - protein, 15 aa, BK virus
FFRDSLARFLEETTW

SEQ ID NO: 33624 - protein, 15 aa, BK virus
FRDSLARFLEETTWT

SEQ ID NO: 33625 - protein, 15 aa, BK virus
RDSLARFLEETTWTI

SEQ ID NO: 33626 - protein, 15 aa, BK virus
DSLARFLEETTWTIV

SEQ ID NO: 33627 - protein, 15 aa, BK virus
SLARFLEETTWTIVN

SEQ ID NO: 33628 - protein, 15 aa, BK virus
LARFLEETTWTIVNA

SEQ ID NO: 33629 - protein, 15 aa, BK virus
ARFLEETTWTIVNAP

SEQ ID NO: 33630 - protein, 15 aa, BK virus
RFLEETTWTIVNAPI

SEQ ID NO: 33631 - protein, 15 aa, BK virus
FLEETTWTIVNAPIN

SEQ ID NO: 33632 - protein, 15 aa, BK virus
LEETTWTIVNAPINF

SEQ ID NO: 33633 - protein, 15 aa, BK virus
EETTWTIVNAPINFY

SEQ ID NO: 33634 - protein, 15 aa, BK virus
ETTWTIVNAPINFYN

SEQ ID NO: 33635 - protein, 15 aa, BK virus
TTWTIVNAPINFYNY

SEQ ID NO: 33636 - protein, 15 aa, BK virus
TWTIVNAPINFYNYI

SEQ ID NO: 33637 - protein, 15 aa, BK virus
WTIVNAPINFYNYIQ

SEQ ID NO: 33638 - protein, 15 aa, BK virus
TIVNAPINFYNYIQQ

SEQ ID NO: 33639 - protein, 15 aa, BK virus
IVNAPINFYNYIQQY

SEQ ID NO: 33640 - protein, 15 aa, BK virus
VNAPINFYNYIQQYY

SEQ ID NO: 33641 - protein, 15 aa, BK virus
NAPINFYNYIQQYYS

SEQ ID NO: 33642 - protein, 15 aa, BK virus
APINFYNYIQQYYSD

SEQ ID NO: 33643 - protein, 15 aa, BK virus
PINFYNYIQQYYSDL

SEQ ID NO: 33644 - protein, 15 aa, BK virus
INFYNYIQQYYSDLS

SEQ ID NO: 33645 - protein, 15 aa, BK virus
NFYNYIQQYYSDLSP

SEQ ID NO: 33646 - protein, 15 aa, BK virus
FYNYIQQYYSDLSPI

SEQ ID NO: 33647 - protein, 15 aa, BK virus
YNYIQQYYSDLSPIR

SEQ ID NO: 33648 - protein, 15 aa, BK virus
NYIQQYYSDLSPIRP

SEQ ID NO: 33649 - protein, 15 aa, BK virus
YIQQYYSDLSPIRPS

SEQ ID NO: 33650 - protein, 15 aa, BK virus
IQQYYSDLSPIRPSM

SEQ ID NO: 33651 - protein, 15 aa, BK virus
QQYYSDLSPIRPSMV

SEQ ID NO: 33652 - protein, 15 aa, BK virus
QYYSDLSPIRPSMVR

SEQ ID NO: 33653 - protein, 15 aa, BK virus
YYSDLSPIRPSMVRQ

SEQ ID NO: 33654 - protein, 15 aa, BK virus
YSDLSPIRPSMVRQV

SEQ ID NO: 33655 - protein, 15 aa, BK virus
SDLSPIRPSMVRQVA

SEQ ID NO: 33656 - protein, 15 aa, BK virus
DLSPIRPSMVRQVAE

SEQ ID NO: 33657 - protein, 15 aa, BK virus
LSPIRPSMVRQVAER

SEQ ID NO: 33658 - protein, 15 aa, BK virus
SPIRPSMVRQVAERE

SEQ ID NO: 33659 - protein, 15 aa, BK virus
PIRPSMVRQVAEREG

SEQ ID NO: 33660 - protein, 15 aa, BK virus
IRPSMVRQVAEREGT

SEQ ID NO: 33661 - protein, 15 aa, BK virus
RPSMVRQVAEREGTR

SEQ ID NO: 33662 - protein, 15 aa, BK virus
PSMVRQVAEREGTRV

SEQ ID NO: 33663 - protein, 15 aa, BK virus
SMVRQVAEREGTRVH

SEQ ID NO: 33664 - protein, 15 aa, BK virus
MVRQVAEREGTRVHF

SEQ ID NO: 33665 - protein, 15 aa, BK virus
VRQVAEREGTRVHFG

SEQ ID NO: 33666 - protein, 15 aa, BK virus
RQVAEREGTRVHFGH

SEQ ID NO: 33667 - protein, 15 aa, BK virus
QVAEREGTRVHFGHT

SEQ ID NO: 33668 - protein, 15 aa, BK virus
VAEREGTRVHFGHTY

SEQ ID NO: 33669 - protein, 15 aa, BK virus
AEREGTRVHFGHTYS

SEQ ID NO: 33670 - protein, 15 aa, BK virus
EREGTRVHFGHTYSI

SEQ ID NO: 33671 - protein, 15 aa, BK virus
REGTRVHFGHTYSID

SEQ ID NO: 33672 - protein, 15 aa, BK virus
EGTRVHFGHTYSIDD

SEQ ID NO: 33673 - protein, 15 aa, BK virus
GTRVHFGHTYSIDDA

SEQ ID NO: 33674 - protein, 15 aa, BK virus
TRVHFGHTYSIDDAD

SEQ ID NO: 33675 - protein, 15 aa, BK virus
RVHFGHTYSIDDADS

SEQ ID NO: 33676 - protein, 15 aa, BK virus
VHFGHTYSIDDADSI

SEQ ID NO: 33677 - protein, 15 aa, BK virus
HFGHTYSIDDADSIE

SEQ ID NO: 33678 - protein, 15 aa, BK virus
FGHTYSIDDADSIEE

SEQ ID NO: 33679 - protein, 15 aa, BK virus
GHTYSIDDADSIEEV

SEQ ID NO: 33680 - protein, 15 aa, BK virus
HTYSIDDADSIEEVT

SEQ ID NO: 33681 - protein, 15 aa, BK virus
TYSIDDADSIEEVTQ

SEQ ID NO: 33682 - protein, 15 aa, BK virus
YSIDDADSIEEVTQR

SEQ ID NO: 33683 - protein, 15 aa, BK virus
SIDDADSIEEVTQRM

SEQ ID NO: 33684 - protein, 15 aa, BK virus
IDDADSIEEVTQRMD

SEQ ID NO: 33685 - protein, 15 aa, BK virus
DDADSIEEVTQRMDL

SEQ ID NO: 33686 - protein, 15 aa, BK virus
DADSIEEVTQRMDLR

SEQ ID NO: 33687 - protein, 15 aa, BK virus
ADSIEEVTQRMDLRN

SEQ ID NO: 33688 - protein, 15 aa, BK virus
DSIEEVTQRMDLRNQ

SEQ ID NO: 33689 - protein, 15 aa, BK virus
SIEEVTQRMDLRNQQ

SEQ ID NO: 33690 - protein, 15 aa, BK virus
IEEVTQRMDLRNQQS

SEQ ID NO: 33691 - protein, 15 aa, BK virus
EEVTQRMDLRNQQSV

SEQ ID NO: 33692 - protein, 15 aa, BK virus
EVTQRMDLRNQQSVH

SEQ ID NO: 33693 - protein, 15 aa, BK virus
VTQRMDLRNQQSVHS

SEQ ID NO: 33694 - protein, 15 aa, BK virus
TQRMDLRNQQSVHSG

SEQ ID NO: 33695 - protein, 15 aa, BK virus
QRMDLRNQQSVHSGE

SEQ ID NO: 33696 - protein, 15 aa, BK virus
RMDLRNQQSVHSGEF

SEQ ID NO: 33697 - protein, 15 aa, BK virus
MDLRNQQSVHSGEFI

SEQ ID NO: 33698 - protein, 15 aa, BK virus
DLRNQQSVHSGEFIE

SEQ ID NO: 33699 - protein, 15 aa, BK virus
LRNQQSVHSGEFIEK

SEQ ID NO: 33700 - protein, 15 aa, BK virus
RNQQSVHSGEFIEKT

SEQ ID NO: 33701 - protein, 15 aa, BK virus
NQQSVHSGEFIEKTI

SEQ ID NO: 33702 - protein, 15 aa, BK virus
QQSVHSGEFIEKTIA

SEQ ID NO: 33703 - protein, 15 aa, BK virus
QSVHSGEFIEKTIAP

SEQ ID NO: 33704 - protein, 15 aa, BK virus
SVHSGEFIEKTIAPG

SEQ ID NO: 33705 - protein, 15 aa, BK virus
VHSGEFIEKTIAPGG

SEQ ID NO: 33706 - protein, 15 aa, BK virus
HSGEFIEKTIAPGGA

SEQ ID NO: 33707 - protein, 15 aa, BK virus
SGEFIEKTIAPGGAN

SEQ ID NO: 33708 - protein, 15 aa, BK virus
GEFIEKTIAPGGANQ

SEQ ID NO: 33709 - protein, 15 aa, BK virus
EFIEKTIAPGGANQR

SEQ ID NO: 33710 - protein, 15 aa, BK virus
FIEKTIAPGGANQRT

SEQ ID NO: 33711 - protein, 15 aa, BK virus
IEKTIAPGGANQRTA

SEQ ID NO: 33712 - protein, 15 aa, BK virus
EKTIAPGGANQRTAP

SEQ ID NO: 33713 - protein, 15 aa, BK virus
KTIAPGGANQRTAPQ

SEQ ID NO: 33714 - protein, 15 aa, BK virus
TIAPGGANQRTAPQW

SEQ ID NO: 33715 - protein, 15 aa, BK virus
IAPGGANQRTAPQWM

SEQ ID NO: 33716 - protein, 15 aa, BK virus
APGGANQRTAPQWML

SEQ ID NO: 33717 - protein, 15 aa, BK virus
PGGANQRTAPQWMLP

SEQ ID NO: 33718 - protein, 15 aa, BK virus
GGANQRTAPQWMLPL

SEQ ID NO: 33719 - protein, 15 aa, BK virus
GANQRTAPQWMLPLL

SEQ ID NO: 33720 - protein, 15 aa, BK virus
ANQRTAPQWMLPLLL

SEQ ID NO: 33721 - protein, 15 aa, BK virus
NQRTAPQWMLPLLLG

SEQ ID NO: 33722 - protein, 15 aa, BK virus
QRTAPQWMLPLLLGL

SEQ ID NO: 33723 - protein, 15 aa, BK virus
RTAPQWMLPLLLGLY

SEQ ID NO: 33724 - protein, 15 aa, BK virus
TAPQWMLPLLLGLYG

SEQ ID NO: 33725 - protein, 15 aa, BK virus
APQWMLPLLLGLYGT

SEQ ID NO: 33726 - protein, 15 aa, BK virus
PQWMLPLLLGLYGTV

SEQ ID NO: 33727 - protein, 15 aa, BK virus
QWMLPLLLGLYGTVT

SEQ ID NO: 33728 - protein, 15 aa, BK virus
WMLPLLLGLYGTVTP

SEQ ID NO: 33729 - protein, 15 aa, BK virus
MLPLLLGLYGTVTPA

SEQ ID NO: 33730 - protein, 15 aa, BK virus
LPLLLGLYGTVTPAL

SEQ ID NO: 33731 - protein, 15 aa, BK virus
PLLLGLYGTVTPALE

SEQ ID NO: 33732 - protein, 15 aa, BK virus
LLLGLYGTVTPALEA

SEQ ID NO: 33733 - protein, 15 aa, BK virus
LLGLYGTVTPALEAY

SEQ ID NO: 33734 - protein, 15 aa, BK virus
LGLYGTVTPALEAYE

SEQ ID NO: 33735 - protein, 15 aa, BK virus
GLYGTVTPALEAYED

SEQ ID NO: 33736 - protein, 15 aa, BK virus
LYGTVTPALEAYEDG

SEQ ID NO: 33737 - protein, 15 aa, BK virus
YGTVTPALEAYEDGP

SEQ ID NO: 33738 - protein, 15 aa, BK virus
GTVTPALEAYEDGPN

SEQ ID NO: 33739 - protein, 15 aa, BK virus
TVTPALEAYEDGPNQ

SEQ ID NO: 33740 - protein, 15 aa, BK virus
VTPALEAYEDGPNQK

SEQ ID NO: 33741 - protein, 15 aa, BK virus
TPALEAYEDGPNQKK

SEQ ID NO: 33742 - protein, 15 aa, BK virus
PALEAYEDGPNQKKR

SEQ ID NO: 33743 - protein, 15 aa, BK virus
ALEAYEDGPNQKKRR

SEQ ID NO: 33744 - protein, 15 aa, BK virus
LEAYEDGPNQKKRRV

SEQ ID NO: 33745 - protein, 15 aa, BK virus
EAYEDGPNQKKRRVS

SEQ ID NO: 33746 - protein, 15 aa, BK virus
AYEDGPNQKKRRVSR

SEQ ID NO: 33747 - protein, 15 aa, BK virus
YEDGPNQKKRRVSRG

SEQ ID NO: 33748 - protein, 15 aa, BK virus
EDGPNQKKRRVSRGS

SEQ ID NO: 33749 - protein, 15 aa, BK virus
DGPNQKKRRVSRGSS

SEQ ID NO: 33750 - protein, 15 aa, BK virus
GPNQKKRRVSRGSSQ

SEQ ID NO: 33751 - protein, 15 aa, BK virus
PNQKKRRVSRGSSQK

SEQ ID NO: 33752 - protein, 15 aa, BK virus
NQKKRRVSRGSSQKA

SEQ ID NO: 33753 - protein, 15 aa, BK virus
QKKRRVSRGSSQKAK

SEQ ID NO: 33754 - protein, 15 aa, BK virus
KKRRVSRGSSQKAKG

SEQ ID NO: 33755 - protein, 15 aa, BK virus
KRRVSRGSSQKAKGT

SEQ ID NO: 33756 - protein, 15 aa, BK virus
RRVSRGSSQKAKGTR

SEQ ID NO: 33757 - protein, 15 aa, BK virus
RVSRGSSQKAKGTRA

SEQ ID NO: 33758 - protein, 15 aa, BK virus
VSRGSSQKAKGTRAS

SEQ ID NO: 33759 - protein, 15 aa, BK virus
SRGSSQKAKGTRASA

SEQ ID NO: 33760 - protein, 15 aa, BK virus
RGSSQKAKGTRASAK

SEQ ID NO: 33761 - protein, 15 aa, BK virus
GSSQKAKGTRASAKT

SEQ ID NO: 33762 - protein, 15 aa, BK virus
SSQKAKGTRASAKTT

SEQ ID NO: 33763 - protein, 15 aa, BK virus
SQKAKGTRASAKTTN

SEQ ID NO: 33764 - protein, 15 aa, BK virus
QKAKGTRASAKTTNK

SEQ ID NO: 33765 - protein, 15 aa, BK virus
KAKGTRASAKTTNKR

SEQ ID NO: 33766 - protein, 15 aa, BK virus
AKGTRASAKTTNKRR

SEQ ID NO: 33767 - protein, 15 aa, BK virus
KGTRASAKTTNKRRS

SEQ ID NO: 33768 - protein, 15 aa, BK virus
GTRASAKTTNKRRSR

SEQ ID NO: 33769 - protein, 15 aa, BK virus
TRASAKTTNKRRSRS

SEQ ID NO: 33770 - protein, 15 aa, BK virus
RASAKTTNKRRSRSS

SEQ ID NO: 33771 - protein, 15 aa, BK virus
ASAKTTNKRRSRSSR

SEQ ID NO: 33772 - protein, 15 aa, BK virus
SAKTTNKRRSRSSRS

SEQ ID NO: 33773 - protein, 15 aa, BK virus
NWGRCYYRGRMLPKP

SEQ ID NO: 33774 - protein, 15 aa, BK virus
WGRCYYRGRMLPKPR

SEQ ID NO: 33775 - protein, 15 aa, BK virus
GRCYYRGRMLPKPRN

SEQ ID NO: 33776 - protein, 15 aa, BK virus
RCYYRGRMLPKPRNG

SEQ ID NO: 33777 - protein, 15 aa, BK virus
CYYRGRMLPKPRNGG

SEQ ID NO: 33778 - protein, 15 aa, BK virus
YYRGRMLPKPRNGGS

SEQ ID NO: 33779 - protein, 15 aa, BK virus
YRGRMLPKPRNGGSR

SEQ ID NO: 33780 - protein, 15 aa, BK virus
PREKNASLLQHSKNS

SEQ ID NO: 33781 - protein, 15 aa, BK virus
REKNASLLQHSKNSP

SEQ ID NO: 33782 - protein, 15 aa, BK virus
EKNASLLQHSKNSPP

SEQ ID NO: 33783 - protein, 15 aa, BK virus
KNASLLQHSKNSPPQ

SEQ ID NO: 33784 - protein, 15 aa, BK virus
NASLLQHSKNSPPQF

SEQ ID NO: 33785 - protein, 15 aa, BK virus
ASLLQHSKNSPPQFK

SEQ ID NO: 33786 - protein, 15 aa, BK virus
GPNLWKSTDVGGCNC

SEQ ID NO: 33787 - protein, 15 aa, BK virus
PNLWKSTDVGGCNCT

SEQ ID NO: 33788 - protein, 15 aa, BK virus
NLWKSTDVGGCNCTN

SEQ ID NO: 33789 - protein, 15 aa, BK virus
LWKSTDVGGCNCTNR

SEQ ID NO: 33790 - protein, 15 aa, BK virus
WKSTDVGGCNCTNRG

SEQ ID NO: 33791 - protein, 15 aa, BK virus
KSTDVGGCNCTNRGY

SEQ ID NO: 33792 - protein, 15 aa, BK virus
STDVGGCNCTNRGYW

SEQ ID NO: 33793 - protein, 15 aa, BK virus
TDVGGCNCTNRGYWN

SEQ ID NO: 33794 - protein, 15 aa, BK virus
DVGGCNCTNRGYWNN

SEQ ID NO: 33795 - protein, 15 aa, BK virus
FPLLCCRWRTLGNAG

SEQ ID NO: 33796 - protein, 15 aa, BK virus
PLLCCRWRTLGNAGS

SEQ ID NO: 33797 - protein, 15 aa, BK virus
LLCCRWRTLGNAGSA

SEQ ID NO: 33798 - protein, 15 aa, BK virus
LCCRWRTLGNAGSAN

SEQ ID NO: 33799 - protein, 15 aa, BK virus
CCRWRTLGNAGSANE

SEQ ID NO: 33800 - protein, 15 aa, BK virus
CRWRTLGNAGSANEL

SEQ ID NO: 33801 - protein, 15 aa, BK virus
RWRTLGNAGSANELQ

SEQ ID NO: 33802 - protein, 15 aa, BK virus
WRTLGNAGSANELQV

SEQ ID NO: 33803 - protein, 15 aa, BK virus
RTLGNAGSANELQVK

SEQ ID NO: 33804 - protein, 15 aa, BK virus
TLGNAGSANELQVKV

SEQ ID NO: 33805 - protein, 15 aa, BK virus
LGNAGSANELQVKVP

SEQ ID NO: 33806 - protein, 15 aa, BK virus
VFWDFHRRGKCSPST

SEQ ID NO: 33807 - protein, 15 aa, BK virus
FWDFHRRGKCSPSTS

SEQ ID NO: 33808 - protein, 15 aa, BK virus
WDFHRRGKCSPSTSC

SEQ ID NO: 33809 - protein, 15 aa, BK virus
DFHRRGKCSPSTSCD

SEQ ID NO: 33810 - protein, 15 aa, BK virus
FHRRGKCSPSTSCDQ

SEQ ID NO: 33811 - protein, 15 aa, BK virus
HRRGKCSPSTSCDQH

SEQ ID NO: 33812 - protein, 15 aa, BK virus
RRGKCSPSTSCDQHS

SEQ ID NO: 33813 - protein, 15 aa, BK virus
RGKCSPSTSCDQHSY

SEQ ID NO: 33814 - protein, 15 aa, BK virus
GKCSPSTSCDQHSYH

SEQ ID NO: 33815 - protein, 15 aa, BK virus
KCSPSTSCDQHSYHS

SEQ ID NO: 33816 - protein, 15 aa, BK virus
CSPSTSCDQHSYHSV

SEQ ID NO: 33817 - protein, 15 aa, BK virus
SPSTSCDQHSYHSVA

SEQ ID NO: 33818 - protein, 15 aa, BK virus
PSTSCDQHSYHSVAR

SEQ ID NO: 33819 - protein, 15 aa, BK virus
DPPEKKICKESLPNF

SEQ ID NO: 33820 - protein, 15 aa, BK virus
PPEKKICKESLPNFL

SEQ ID NO: 33821 - protein, 15 aa, BK virus
PEKKICKESLPNFLF

SEQ ID NO: 33822 - protein, 15 aa, BK virus
EKKICKESLPNFLFA

SEQ ID NO: 33823 - protein, 15 aa, BK virus
KKICKESLPNFLFAK

SEQ ID NO: 33824 - protein, 15 aa, BK virus
PYKQENPESGWAAYV

SEQ ID NO: 33825 - protein, 15 aa, BK virus
YKQENPESGWAAYVW

SEQ ID NO: 33826 - protein, 15 aa, BK virus
KQENPESGWAAYVWY

SEQ ID NO: 33827 - protein, 15 aa, BK virus
QENPESGWAAYVWYG

SEQ ID NO: 33828 - protein, 15 aa, BK virus
ENPESGWAAYVWYGI

SEQ ID NO: 33829 - protein, 15 aa, BK virus
NPESGWAAYVWYGIP

SEQ ID NO: 33830 - protein, 15 aa, BK virus
PESGWAAYVWYGIPG

SEQ ID NO: 33831 - protein, 15 aa, BK virus
ESGWAAYVWYGIPGR

SEQ ID NO: 33832 - protein, 15 aa, BK virus
SGWAAYVWYGIPGRR

SEQ ID NO: 33833 - protein, 15 aa, BK virus
GWAAYVWYGIPGRRG

SEQ ID NO: 33834 - protein, 15 aa, BK virus
WHRKTSRGPRYDKIY

SEQ ID NO: 33835 - protein, 15 aa, BK virus
QTGTIANQNALNRCF

SEQ ID NO: 33836 - protein, 15 aa, BK virus
TGTIANQNALNRCFY

SEQ ID NO: 33837 - protein, 15 aa, BK virus
GTIANQNALNRCFYC

SEQ ID NO: 33838 - protein, 15 aa, BK virus
TIANQNALNRCFYCT

SEQ ID NO: 33839 - protein, 15 aa, BK virus
IANQNALNRCFYCTY

SEQ ID NO: 33840 - protein, 15 aa, BK virus
ANQNALNRCFYCTYT

SEQ ID NO: 33841 - protein, 15 aa, BK virus
NQNALNRCFYCTYTF

SEQ ID NO: 33842 - protein, 15 aa, BK virus
QNALNRCFYCTYTFN

SEQ ID NO: 33843 - protein, 15 aa, BK virus
NALNRCFYCTYTFNK

SEQ ID NO: 33844 - protein, 15 aa, BK virus
ALNRCFYCTYTFNKC

SEQ ID NO: 33845 - protein, 15 aa, BK virus
LNRCFYCTYTFNKCC

SEQ ID NO: 33846 - protein, 15 aa, BK virus
NRCFYCTYTFNKCCF

SEQ ID NO: 33847 - protein, 15 aa, BK virus
RCFYCTYTFNKCCFC

SEQ ID NO: 33848 - protein, 15 aa, BK virus
CFYCTYTFNKCCFCI

SEQ ID NO: 33849 - protein, 15 aa, BK virus
FYCTYTFNKCCFCIS

SEQ ID NO: 33850 - protein, 15 aa, BK virus
YCTYTFNKCCFCISH

SEQ ID NO: 33851 - protein, 15 aa, BK virus
CTYTFNKCCFCISHF

SEQ ID NO: 33852 - protein, 15 aa, BK virus
NTESLYTNATLDYGG

SEQ ID NO: 33853 - protein, 15 aa, BK virus
TESLYTNATLDYGGL

SEQ ID NO: 33854 - protein, 15 aa, BK virus
ESLYTNATLDYGGLT

SEQ ID NO: 33855 - protein, 15 aa, BK virus
SLYTNATLDYGGLTF

SEQ ID NO: 33856 - protein, 15 aa, BK virus
LYTNATLDYGGLTFG

SEQ ID NO: 33857 - protein, 15 aa, BK virus
YTNATLDYGGLTFGN

SEQ ID NO: 33858 - protein, 15 aa, BK virus
TNATLDYGGLTFGNL

SEQ ID NO: 33859 - protein, 15 aa, BK virus
NATLDYGGLTFGNLQ

SEQ ID NO: 33860 - protein, 15 aa, BK virus
ATLDYGGLTFGNLQQ

SEQ ID NO: 33861 - protein, 15 aa, BK virus
TLDYGGLTFGNLQQG

SEQ ID NO: 33862 - protein, 15 aa, BK virus
LDYGGLTFGNLQQGL

SEQ ID NO: 33863 - protein, 15 aa, BK virus
DYGGLTFGNLQQGLK

SEQ ID NO: 33864 - protein, 15 aa, BK virus
YGGLTFGNLQQGLKY

SEQ ID NO: 33865 - protein, 15 aa, BK virus
GGLTFGNLQQGLKYL

SEQ ID NO: 33866 - protein, 15 aa, BK virus
GLTFGNLQQGLKYLR

SEQ ID NO: 33867 - protein, 15 aa, BK virus
LTFGNLQQGLKYLRL

SEQ ID NO: 33868 - protein, 15 aa, BK virus
TFGNLQQGLKYLRLG

SEQ ID NO: 33869 - protein, 15 aa, BK virus
FGNLQQGLKYLRLGK

SEQ ID NO: 33870 - protein, 15 aa, BK virus
GNLQQGLKYLRLGKS

SEQ ID NO: 33871 - protein, 15 aa, BK virus
NLQQGLKYLRLGKSI

SEQ ID NO: 33872 - protein, 15 aa, BK virus
LQQGLKYLRLGKSIV

SEQ ID NO: 33873 - protein, 15 aa, BK virus
QQGLKYLRLGKSIVI

SEQ ID NO: 33874 - protein, 15 aa, BK virus
QGLKYLRLGKSIVIG

SEQ ID NO: 33875 - protein, 15 aa, BK virus
GLKYLRLGKSIVIGI

SEQ ID NO: 33876 - protein, 15 aa, BK virus
LKYLRLGKSIVIGIQ

SEQ ID NO: 33877 - protein, 15 aa, BK virus
KYLRLGKSIVIGIQC

SEQ ID NO: 33878 - protein, 15 aa, BK virus
YLRLGKSIVIGIQCL

SEQ ID NO: 33879 - protein, 15 aa, BK virus
LRLGKSIVIGIQCLI

SEQ ID NO: 33880 - protein, 15 aa, BK virus
RLGKSIVIGIQCLIH

SEQ ID NO: 33881 - protein, 15 aa, BK virus
LGKSIVIGIQCLIHV

SEQ ID NO: 33882 - protein, 15 aa, BK virus
GKSIVIGIQCLIHVQ

SEQ ID NO: 33883 - protein, 15 aa, BK virus
KSIVIGIQCLIHVQS

SEQ ID NO: 33884 - protein, 15 aa, BK virus
SIVIGIQCLIHVQSL

SEQ ID NO: 33885 - protein, 15 aa, BK virus
IVIGIQCLIHVQSLQ

SEQ ID NO: 33886 - protein, 15 aa, BK virus
VIGIQCLIHVQSLQF

SEQ ID NO: 33887 - protein, 15 aa, BK virus
IGIQCLIHVQSLQFL

SEQ ID NO: 33888 - protein, 15 aa, BK virus
GIQCLIHVQSLQFLN

SEQ ID NO: 33889 - protein, 15 aa, BK virus
IQCLIHVQSLQFLNP

SEQ ID NO: 33890 - protein, 15 aa, BK virus
QCLIHVQSLQFLNPL

SEQ ID NO: 33891 - protein, 15 aa, BK virus
CLIHVQSLQFLNPLL

SEQ ID NO: 33892 - protein, 15 aa, BK virus
LIHVQSLQFLNPLLL

SEQ ID NO: 33893 - protein, 15 aa, BK virus
YQEYISPCIYYISSL

SEQ ID NO: 33894 - protein, 15 aa, BK virus
QEYISPCIYYISSLK

SEQ ID NO: 33895 - protein, 15 aa, BK virus
EYISPCIYYISSLKK

SEQ ID NO: 33896 - protein, 15 aa, BK virus
YISPCIYYISSLKKY

SEQ ID NO: 33897 - protein, 15 aa, BK virus
ISPCIYYISSLKKYT

SEQ ID NO: 33898 - protein, 15 aa, BK virus
SPCIYYISSLKKYTY

SEQ ID NO: 33899 - protein, 15 aa, BK virus
PCIYYISSLKKYTYL

SEQ ID NO: 33900 - protein, 15 aa, BK virus
CIYYISSLKKYTYLS

SEQ ID NO: 33901 - protein, 15 aa, BK virus
IYYISSLKKYTYLSQ

SEQ ID NO: 33902 - protein, 15 aa, BK virus
YYISSLKKYTYLSQN

SEQ ID NO: 33903 - protein, 15 aa, BK virus
YISSLKKYTYLSQNP

SEQ ID NO: 33904 - protein, 15 aa, BK virus
ISSLKKYTYLSQNPA

SEQ ID NO: 33905 - protein, 15 aa, BK virus
SSLKKYTYLSQNPAF

SEQ ID NO: 33906 - protein, 15 aa, BK virus
SLKKYTYLSQNPAFP

SEQ ID NO: 33907 - protein, 15 aa, BK virus
LKKYTYLSQNPAFPS

SEQ ID NO: 33908 - protein, 15 aa, BK virus
KKYTYLSQNPAFPSI

SEQ ID NO: 33909 - protein, 15 aa, BK virus
KYTYLSQNPAFPSIQ

SEQ ID NO: 33910 - protein, 15 aa, BK virus
YTYLSQNPAFPSIQQ

SEQ ID NO: 33911 - protein, 15 aa, BK virus
TYLSQNPAFPSIQQF

SEQ ID NO: 33912 - protein, 15 aa, BK virus
TKLAVATRSFHFVKF

SEQ ID NO: 33913 - protein, 15 aa, BK virus
KLAVATRSFHFVKFF

SEQ ID NO: 33914 - protein, 15 aa, BK virus
LAVATRSFHFVKFFF

SEQ ID NO: 33915 - protein, 15 aa, BK virus
AVATRSFHFVKFFFQ

SEQ ID NO: 33916 - protein, 15 aa, BK virus
VATRSFHFVKFFFQV

SEQ ID NO: 33917 - protein, 15 aa, BK virus
ATRSFHFVKFFFQVR

SEQ ID NO: 33918 - protein, 15 aa, BK virus
TRSFHFVKFFFQVRT

SEQ ID NO: 33919 - protein, 15 aa, BK virus
RSFHFVKFFFQVRTL

SEQ ID NO: 33920 - protein, 15 aa, BK virus
SFHFVKFFFQVRTLS

SEQ ID NO: 33921 - protein, 15 aa, BK virus
FHFVKFFFQVRTLSF

SEQ ID NO: 33922 - protein, 15 aa, BK virus
HFVKFFFQVRTLSFV

SEQ ID NO: 33923 - protein, 15 aa, BK virus
FVKFFFQVRTLSFVR

SEQ ID NO: 33924 - protein, 15 aa, BK virus
VKFFFQVRTLSFVRI

SEQ ID NO: 33925 - protein, 15 aa, BK virus
KFFFQVRTLSFVRIF

SEQ ID NO: 33926 - protein, 15 aa, BK virus
FFFQVRTLSFVRIFL

SEQ ID NO: 33927 - protein, 15 aa, BK virus
FFQVRTLSFVRIFLN

SEQ ID NO: 33928 - protein, 15 aa, BK virus
FQVRTLSFVRIFLNI

SEQ ID NO: 33929 - protein, 15 aa, BK virus
QVRTLSFVRIFLNIF

SEQ ID NO: 33930 - protein, 15 aa, BK virus
VRTLSFVRIFLNIFW

SEQ ID NO: 33931 - protein, 15 aa, BK virus
RTLSFVRIFLNIFWA

SEQ ID NO: 33932 - protein, 15 aa, BK virus
PSLVEIFGFFCLNVS

SEQ ID NO: 33933 - protein, 15 aa, BK virus
SLVEIFGFFCLNVSF

SEQ ID NO: 33934 - protein, 15 aa, BK virus
LVEIFGFFCLNVSFL

SEQ ID NO: 33935 - protein, 15 aa, BK virus
VEIFGFFCLNVSFLN

SEQ ID NO: 33936 - protein, 15 aa, BK virus
EIFGFFCLNVSFLNL

SEQ ID NO: 33937 - protein, 15 aa, BK virus
IFGFFCLNVSFLNLP

SEQ ID NO: 33938 - protein, 15 aa, BK virus
HFHLNNLSNCLNCLF

SEQ ID NO: 33939 - protein, 15 aa, BK virus
FHLNNLSNCLNCLFH

SEQ ID NO: 33940 - protein, 15 aa, BK virus
HLNNLSNCLNCLFHV

SEQ ID NO: 33941 - protein, 15 aa, BK virus
LNNLSNCLNCLFHVL

SEQ ID NO: 33942 - protein, 15 aa, BK virus
NNLSNCLNCLFHVLK

SEQ ID NO: 33943 - protein, 15 aa, BK virus
NLSNCLNCLFHVLKA

SEQ ID NO: 33944 - protein, 15 aa, BK virus
LSNCLNCLFHVLKAN

SEQ ID NO: 33945 - protein, 15 aa, BK virus
SNCLNCLFHVLKANP

SEQ ID NO: 33946 - protein, 15 aa, BK virus
NCLNCLFHVLKANPL

SEQ ID NO: 33947 - protein, 15 aa, BK virus
CLNCLFHVLKANPLI

SEQ ID NO: 33948 - protein, 15 aa, BK virus
LNCLFHVLKANPLIQ

SEQ ID NO: 33949 - protein, 15 aa, BK virus
NCLFHVLKANPLIQL

SEQ ID NO: 33950 - protein, 15 aa, BK virus
CLFHVLKANPLIQLL

SEQ ID NO: 33951 - protein, 15 aa, BK virus
LFHVLKANPLIQLLS

SEQ ID NO: 33952 - protein, 15 aa, BK virus
FHVLKANPLIQLLSL

SEQ ID NO: 33953 - protein, 15 aa, BK virus
HVLKANPLIQLLSLL

SEQ ID NO: 33954 - protein, 15 aa, BK virus
VLKANPLIQLLSLLH

SEQ ID NO: 33955 - protein, 15 aa, BK virus
LKANPLIQLLSLLHL

SEQ ID NO: 33956 - protein, 15 aa, BK virus
KANPLIQLLSLLHLQ

SEQ ID NO: 33957 - protein, 15 aa, BK virus
ANPLIQLLSLLHLQK

SEQ ID NO: 33958 - protein, 15 aa, BK virus
NPLIQLLSLLHLQKQ

SEQ ID NO: 33959 - protein, 15 aa, BK virus
PLIQLLSLLHLQKQP

SEQ ID NO: 33960 - protein, 15 aa, BK virus
LIQLLSLLHLQKQPC

SEQ ID NO: 33961 - protein, 15 aa, BK virus
IQLLSLLHLQKQPCT

SEQ ID NO: 33962 - protein, 15 aa, BK virus
QLLSLLHLQKQPCTD

SEQ ID NO: 33963 - protein, 15 aa, BK virus
LLSLLHLQKQPCTDL

SEQ ID NO: 33964 - protein, 15 aa, BK virus
LHLAQRLAFPWVGLH

SEQ ID NO: 33965 - protein, 15 aa, BK virus
HLAQRLAFPWVGLHL

SEQ ID NO: 33966 - protein, 15 aa, BK virus
LAQRLAFPWVGLHLR

SEQ ID NO: 33967 - protein, 15 aa, BK virus
AQRLAFPWVGLHLRL

SEQ ID NO: 33968 - protein, 15 aa, BK virus
QRLAFPWVGLHLRLY

SEQ ID NO: 33969 - protein, 15 aa, BK virus
RLAFPWVGLHLRLYH

SEQ ID NO: 33970 - protein, 15 aa, BK virus
LAFPWVGLHLRLYHH

SEQ ID NO: 33971 - protein, 15 aa, BK virus
AFPWVGLHLRLYHHT

SEQ ID NO: 33972 - protein, 15 aa, BK virus
FPWVGLHLRLYHHTN

SEQ ID NO: 33973 - protein, 15 aa, BK virus
PWVGLHLRLYHHTNL

SEQ ID NO: 33974 - protein, 15 aa, BK virus
WVGLHLRLYHHTNLI

SEQ ID NO: 33975 - protein, 15 aa, BK virus
VGLHLRLYHHTNLIT

SEQ ID NO: 33976 - protein, 15 aa, BK virus
GLHLRLYHHTNLITL

SEQ ID NO: 33977 - protein, 15 aa, BK virus
LHLRLYHHTNLITLQ

SEQ ID NO: 33978 - protein, 15 aa, BK virus
HLRLYHHTNLITLQL

SEQ ID NO: 33979 - protein, 15 aa, BK virus
LRLYHHTNLITLQLV

SEQ ID NO: 33980 - protein, 15 aa, BK virus
RLYHHTNLITLQLVL

SEQ ID NO: 33981 - protein, 15 aa, BK virus
LYHHTNLITLQLVLF

SEQ ID NO: 33982 - protein, 15 aa, BK virus
YHHTNLITLQLVLFF

SEQ ID NO: 33983 - protein, 15 aa, BK virus
HHTNLITLQLVLFFH

SEQ ID NO: 33984 - protein, 15 aa, BK virus
HTNLITLQLVLFFHY

SEQ ID NO: 33985 - protein, 15 aa, BK virus
TNLITLQLVLFFHYQ

SEQ ID NO: 33986 - protein, 15 aa, BK virus
NLITLQLVLFFHYQW

SEQ ID NO: 33987 - protein, 15 aa, BK virus
LITLQLVLFFHYQWD

SEQ ID NO: 33988 - protein, 15 aa, BK virus
ITLQLVLFFHYQWDL

SEQ ID NO: 33989 - protein, 15 aa, BK virus
VANSAAKQHLPYIVL

SEQ ID NO: 33990 - protein, 15 aa, BK virus
ANSAAKQHLPYIVLV

SEQ ID NO: 33991 - protein, 15 aa, BK virus
NSAAKQHLPYIVLVQ

SEQ ID NO: 33992 - protein, 15 aa, BK virus
SAAKQHLPYIVLVQH

SEQ ID NO: 33993 - protein, 15 aa, BK virus
AAKQHLPYIVLVQHF

SEQ ID NO: 33994 - protein, 15 aa, BK virus
AKQHLPYIVLVQHFH

SEQ ID NO: 33995 - protein, 15 aa, BK virus
KQHLPYIVLVQHFHE

SEQ ID NO: 33996 - protein, 15 aa, BK virus
QHLPYIVLVQHFHEL

SEQ ID NO: 33997 - protein, 15 aa, BK virus
HLPYIVLVQHFHELQ

SEQ ID NO: 33998 - protein, 15 aa, BK virus
LPYIVLVQHFHELQI

SEQ ID NO: 33999 - protein, 15 aa, BK virus
PYIVLVQHFHELQIL

SEQ ID NO: 34000 - protein, 15 aa, BK virus
YIVLVQHFHELQILN

SEQ ID NO: 34001 - protein, 15 aa, BK virus
IVLVQHFHELQILNP

SEQ ID NO: 34002 - protein, 15 aa, BK virus
VLVQHFHELQILNPF

SEQ ID NO: 34003 - protein, 15 aa, BK virus
LVQHFHELQILNPFY

SEQ ID NO: 34004 - protein, 15 aa, BK virus
VQHFHELQILNPFYL

SEQ ID NO: 34005 - protein, 15 aa, BK virus
QHFHELQILNPFYLI

SEQ ID NO: 34006 - protein, 15 aa, BK virus
HFHELQILNPFYLIY

SEQ ID NO: 34007 - protein, 15 aa, BK virus
FHELQILNPFYLIYD

SEQ ID NO: 34008 - protein, 15 aa, BK virus
IFLLAFLPWSYEGYL

SEQ ID NO: 34009 - protein, 15 aa, BK virus
FLLAFLPWSYEGYLL

SEQ ID NO: 34010 - protein, 15 aa, BK virus
LLAFLPWSYEGYLLF

SEQ ID NO: 34011 - protein, 15 aa, BK virus
LAFLPWSYEGYLLFF

SEQ ID NO: 34012 - protein, 15 aa, BK virus
LKLYLLLADKYFFDF

SEQ ID NO: 34013 - protein, 15 aa, BK virus
KLYLLLADKYFFDFY

SEQ ID NO: 34014 - protein, 15 aa, BK virus
LYLLLADKYFFDFYF

SEQ ID NO: 34015 - protein, 15 aa, BK virus
YLLLADKYFFDFYFL

SEQ ID NO: 34016 - protein, 15 aa, BK virus
LLLADKYFFDFYFLQ

SEQ ID NO: 34017 - protein, 15 aa, BK virus
LLADKYFFDFYFLQK

SEQ ID NO: 34018 - protein, 15 aa, BK virus
SDKAGLFSDTFYTPL

SEQ ID NO: 34019 - protein, 15 aa, BK virus
DKAGLFSDTFYTPLH

SEQ ID NO: 34020 - protein, 15 aa, BK virus
KAGLFSDTFYTPLHC

SEQ ID NO: 34021 - protein, 15 aa, BK virus
AGLFSDTFYTPLHCI

SEQ ID NO: 34022 - protein, 15 aa, BK virus
GLFSDTFYTPLHCIE

SEQ ID NO: 34023 - protein, 15 aa, BK virus
LFSDTFYTPLHCIEI

SEQ ID NO: 34024 - protein, 15 aa, BK virus
FSDTFYTPLHCIEIL

SEQ ID NO: 34025 - protein, 15 aa, BK virus
SDTFYTPLHCIEILN

SEQ ID NO: 34026 - protein, 15 aa, BK virus
DTFYTPLHCIEILNT

SEQ ID NO: 34027 - protein, 15 aa, BK virus
TFYTPLHCIEILNTY

SEQ ID NO: 34028 - protein, 15 aa, BK virus
FYTPLHCIEILNTYL

SEQ ID NO: 34029 - protein, 15 aa, BK virus
YTPLHCIEILNTYLI

SEQ ID NO: 34030 - protein, 15 aa, BK virus
TPLHCIEILNTYLII

SEQ ID NO: 34031 - protein, 15 aa, BK virus
PLHCIEILNTYLIIK

SEQ ID NO: 34032 - protein, 15 aa, BK virus
LHCIEILNTYLIIKT

SEQ ID NO: 34033 - protein, 15 aa, BK virus
HCIEILNTYLIIKTH

SEQ ID NO: 34034 - protein, 15 aa, BK virus
CIEILNTYLIIKTHP

SEQ ID NO: 34035 - protein, 15 aa, BK virus
IEILNTYLIIKTHPH

SEQ ID NO: 34036 - protein, 15 aa, BK virus
EILNTYLIIKTHPHT

SEQ ID NO: 34037 - protein, 15 aa, BK virus
ILNTYLIIKTHPHTL

SEQ ID NO: 34038 - protein, 15 aa, BK virus
LNTYLIIKTHPHTLS

SEQ ID NO: 34039 - protein, 15 aa, BK virus
NTYLIIKTHPHTLSL

SEQ ID NO: 34040 - protein, 15 aa, BK virus
TYLIIKTHPHTLSLL

SEQ ID NO: 34041 - protein, 15 aa, BK virus
YLIIKTHPHTLSLLH

SEQ ID NO: 34042 - protein, 15 aa, BK virus
LIIKTHPHTLSLLHT

SEQ ID NO: 34043 - protein, 15 aa, BK virus
IIKTHPHTLSLLHTQ

SEQ ID NO: 34044 - protein, 15 aa, BK virus
LISKTPALFLQALLG

SEQ ID NO: 34045 - protein, 15 aa, BK virus
GLLPFFFFWVVLSVE

SEQ ID NO: 34046 - protein, 15 aa, BK virus
LLPFFFFWVVLSVEN

SEQ ID NO: 34047 - protein, 15 aa, BK virus
LPFFFFWVVLSVENL

SEQ ID NO: 34048 - protein, 15 aa, BK virus
PFFFFWVVLSVENLL

SEQ ID NO: 34049 - protein, 15 aa, BK virus
FFFFWVVLSVENLLL

SEQ ID NO: 34050 - protein, 15 aa, BK virus
FFFWVVLSVENLLLL

SEQ ID NO: 34051 - protein, 15 aa, BK virus
FFWVVLSVENLLLLL

SEQ ID NO: 34052 - protein, 15 aa, BK virus
FWVVLSVENLLLLLH

SEQ ID NO: 34053 - protein, 15 aa, BK virus
WVVLSVENLLLLLHH

SEQ ID NO: 34054 - protein, 15 aa, BK virus
VVLSVENLLLLLHHW

SEQ ID NO: 34055 - protein, 15 aa, BK virus
VLSVENLLLLLHHWQ

SEQ ID NO: 34056 - protein, 15 aa, BK virus
LSVENLLLLLHHWQT

SEQ ID NO: 34057 - protein, 15 aa, BK virus
SVENLLLLLHHWQTY

SEQ ID NO: 34058 - protein, 15 aa, BK virus
VENLLLLLHHWQTYL

SEQ ID NO: 34059 - protein, 15 aa, BK virus
ENLLLLLHHWQTYLH

SEQ ID NO: 34060 - protein, 15 aa, BK virus
NLLLLLHHWQTYLHG

SEQ ID NO: 34061 - protein, 15 aa, BK virus
LLLLLHHWQTYLHGK

SEQ ID NO: 34062 - protein, 15 aa, BK virus
LLLLHHWQTYLHGKI

SEQ ID NO: 34063 - protein, 15 aa, BK virus
LLLHHWQTYLHGKIN

SEQ ID NO: 34064 - protein, 15 aa, BK virus
LLHHWQTYLHGKINL

SEQ ID NO: 34065 - protein, 15 aa, BK virus
LHHWQTYLHGKINLH

SEQ ID NO: 34066 - protein, 15 aa, BK virus
HHWQTYLHGKINLHP

SEQ ID NO: 34067 - protein, 15 aa, BK virus
HWQTYLHGKINLHPI

SEQ ID NO: 34068 - protein, 15 aa, BK virus
WQTYLHGKINLHPIF

SEQ ID NO: 34069 - protein, 15 aa, BK virus
QTYLHGKINLHPIFH

SEQ ID NO: 34070 - protein, 15 aa, BK virus
RNSTRTPTLLFHRLA

SEQ ID NO: 34071 - protein, 15 aa, BK virus
NSTRTPTLLFHRLAP

SEQ ID NO: 34072 - protein, 15 aa, BK virus
STRTPTLLFHRLAPI

SEQ ID NO: 34073 - protein, 15 aa, BK virus
TRTPTLLFHRLAPIK

SEQ ID NO: 34074 - protein, 15 aa, BK virus
RTPTLLFHRLAPIKK

SEQ ID NO: 34075 - protein, 15 aa, BK virus
TPTLLFHRLAPIKKI

SEQ ID NO: 34076 - protein, 15 aa, BK virus
PTLLFHRLAPIKKII

SEQ ID NO: 34077 - protein, 15 aa, BK virus
TLLFHRLAPIKKIIT

SEQ ID NO: 34078 - protein, 15 aa, BK virus
GLLIFYYLSKYKLVT

SEQ ID NO: 34079 - protein, 15 aa, BK virus
LLIFYYLSKYKLVTL

SEQ ID NO: 34080 - protein, 15 aa, BK virus
LIFYYLSKYKLVTLK

SEQ ID NO: 34081 - protein, 15 aa, BK virus
IFYYLSKYKLVTLKL

SEQ ID NO: 34082 - protein, 15 aa, BK virus
ISEGSFSNYLDPPLQ

SEQ ID NO: 34083 - protein, 15 aa, BK virus
SEGSFSNYLDPPLQS

SEQ ID NO: 34084 - protein, 15 aa, BK virus
EGSFSNYLDPPLQSF

SEQ ID NO: 34085 - protein, 15 aa, BK virus
GSFSNYLDPPLQSFF

SEQ ID NO: 34086 - protein, 15 aa, BK virus
SFSNYLDPPLQSFFS

SEQ ID NO: 34087 - protein, 15 aa, BK virus
AKPLCEAVNAVAIYP

SEQ ID NO: 34088 - protein, 15 aa, BK virus
KPLCEAVNAVAIYPN

SEQ ID NO: 34089 - protein, 15 aa, BK virus
PLCEAVNAVAIYPNQ

SEQ ID NO: 34090 - protein, 15 aa, BK virus
LCEAVNAVAIYPNQG

SEQ ID NO: 34091 - protein, 15 aa, BK virus
CEAVNAVAIYPNQGL

SEQ ID NO: 34092 - protein, 15 aa, BK virus
EAVNAVAIYPNQGLF

SEQ ID NO: 34093 - protein, 15 aa, BK virus
AVNAVAIYPNQGLFS

SEQ ID NO: 34094 - protein, 15 aa, BK virus
HARAVHRRLFGTNRP

SEQ ID NO: 34095 - protein, 15 aa, BK virus
ARAVHRRLFGTNRPF

SEQ ID NO: 34096 - protein, 15 aa, BK virus
RAVHRRLFGTNRPFL

SEQ ID NO: 34097 - protein, 15 aa, BK virus
AVHRRLFGTNRPFLA

SEQ ID NO: 34098 - protein, 15 aa, BK virus
VHRRLFGTNRPFLAV

SEQ ID NO: 34099 - protein, 15 aa, BK virus
HRRLFGTNRPFLAVQ

SEQ ID NO: 34100 - protein, 15 aa, BK virus
RRLFGTNRPFLAVQG

SEQ ID NO: 34101 - protein, 15 aa, BK virus
RLFGTNRPFLAVQGI

SEQ ID NO: 34102 - protein, 15 aa, BK virus
LFGTNRPFLAVQGIW

SEQ ID NO: 34103 - protein, 15 aa, BK virus
FGTNRPFLAVQGIWA

SEQ ID NO: 34104 - protein, 15 aa, BK virus
GTNRPFLAVQGIWAK

SEQ ID NO: 34105 - protein, 15 aa, BK virus
TNRPFLAVQGIWAKR

SEQ ID NO: 34106 - protein, 15 aa, BK virus
NRPFLAVQGIWAKRK

SEQ ID NO: 34107 - protein, 15 aa, BK virus
RPFLAVQGIWAKRKI

SEQ ID NO: 34108 - protein, 15 aa, BK virus
PFLAVQGIWAKRKIS

SEQ ID NO: 34109 - protein, 15 aa, BK virus
FLAVQGIWAKRKIST

SEQ ID NO: 34110 - protein, 15 aa, BK virus
LAVQGIWAKRKISTN

SEQ ID NO: 34111 - protein, 15 aa, BK virus
AVQGIWAKRKISTNL

SEQ ID NO: 34112 - protein, 15 aa, BK virus
ATPGSKIRLMSYLYI

SEQ ID NO: 34113 - protein, 15 aa, BK virus
TPGSKIRLMSYLYIL

SEQ ID NO: 34114 - protein, 15 aa, BK virus
PGSKIRLMSYLYILL

SEQ ID NO: 34115 - protein, 15 aa, BK virus
GSKIRLMSYLYILLH

SEQ ID NO: 34116 - protein, 15 aa, BK virus
SKIRLMSYLYILLHF

SEQ ID NO: 34117 - protein, 15 aa, BK virus
KIRLMSYLYILLHFF

SEQ ID NO: 34118 - protein, 15 aa, BK virus
IRLMSYLYILLHFFI

SEQ ID NO: 34119 - protein, 15 aa, BK virus
RLMSYLYILLHFFIQ

SEQ ID NO: 34120 - protein, 15 aa, BK virus
LMSYLYILLHFFIQS

SEQ ID NO: 34121 - protein, 15 aa, BK virus
MSYLYILLHFFIQSI

SEQ ID NO: 34122 - protein, 15 aa, BK virus
SYLYILLHFFIQSIH

SEQ ID NO: 34123 - protein, 15 aa, BK virus
YLYILLHFFIQSIHS

SEQ ID NO: 34124 - protein, 15 aa, BK virus
LYILLHFFIQSIHSL

SEQ ID NO: 34125 - protein, 15 aa, BK virus
YILLHFFIQSIHSLH

SEQ ID NO: 34126 - protein, 15 aa, BK virus
ILLHFFIQSIHSLHF

SEQ ID NO: 34127 - protein, 15 aa, BK virus
LLHFFIQSIHSLHFI

SEQ ID NO: 34128 - protein, 15 aa, BK virus
LHFFIQSIHSLHFIL

SEQ ID NO: 34129 - protein, 15 aa, BK virus
HFFIQSIHSLHFILV

SEQ ID NO: 34130 - protein, 15 aa, BK virus
FFIQSIHSLHFILVA

SEQ ID NO: 34131 - protein, 15 aa, BK virus
FIQSIHSLHFILVAP

SEQ ID NO: 34132 - protein, 15 aa, BK virus
IQSIHSLHFILVAPF

SEQ ID NO: 34133 - protein, 15 aa, BK virus
QSIHSLHFILVAPFV

SEQ ID NO: 34134 - protein, 15 aa, BK virus
SIHSLHFILVAPFVR

SEQ ID NO: 34135 - protein, 15 aa, BK virus
IHSLHFILVAPFVRV

SEQ ID NO: 34136 - protein, 15 aa, BK virus
HSLHFILVAPFVRVK

SEQ ID NO: 34137 - protein, 15 aa, BK virus
SLHFILVAPFVRVKF

SEQ ID NO: 34138 - protein, 15 aa, BK virus
LHFILVAPFVRVKFL

SEQ ID NO: 34139 - protein, 15 aa, BK virus
HFILVAPFVRVKFLT

SEQ ID NO: 34140 - protein, 15 aa, BK virus
KVHELHGFFPVKNFI

SEQ ID NO: 34141 - protein, 15 aa, BK virus
VHELHGFFPVKNFIH

SEQ ID NO: 34142 - protein, 16 aa, BK virus
ASEKASTPLLLERKGG

SEQ ID NO: 34143 - protein, 16 aa, BK virus
SEKASTPLLLERKGGG

SEQ ID NO: 34144 - protein, 16 aa, BK virus
EKASTPLLLERKGGGR

SEQ ID NO: 34145 - protein, 16 aa, BK virus
KASTPLLLERKGGGRG

SEQ ID NO: 34146 - protein, 16 aa, BK virus
ASTPLLLERKGGGRGG

SEQ ID NO: 34147 - protein, 16 aa, BK virus
STPLLLERKGGGRGGL

SEQ ID NO: 34148 - protein, 16 aa, BK virus
TPLLLERKGGGRGGLG

SEQ ID NO: 34149 - protein, 16 aa, BK virus
PLLLERKGGGRGGLGL

SEQ ID NO: 34150 - protein, 16 aa, BK virus
LLLERKGGGRGGLGLL

SEQ ID NO: 34151 - protein, 16 aa, BK virus
LLERKGGGRGGLGLLY

SEQ ID NO: 34152 - protein, 16 aa, BK virus
LERKGGGRGGLGLLYI

SEQ ID NO: 34153 - protein, 16 aa, BK virus
ERKGGGRGGLGLLYII

SEQ ID NO: 34154 - protein, 16 aa, BK virus
RKGGGRGGLGLLYIIK

SEQ ID NO: 34155 - protein, 16 aa, BK virus
KGGGRGGLGLLYIIKK

SEQ ID NO: 34156 - protein, 16 aa, BK virus
GGGRGGLGLLYIIKKK

SEQ ID NO: 34157 - protein, 16 aa, BK virus
GGRGGLGLLYIIKKKA

SEQ ID NO: 34158 - protein, 16 aa, BK virus
GRGGLGLLYIIKKKAT

SEQ ID NO: 34159 - protein, 16 aa, BK virus
RGGLGLLYIIKKKATG

SEQ ID NO: 34160 - protein, 16 aa, BK virus
GGLGLLYIIKKKATGR

SEQ ID NO: 34161 - protein, 16 aa, BK virus
GLGLLYIIKKKATGRS

SEQ ID NO: 34162 - protein, 16 aa, BK virus
LGLLYIIKKKATGRSC

SEQ ID NO: 34163 - protein, 16 aa, BK virus
GLLYIIKKKATGRSCL

SEQ ID NO: 34164 - protein, 16 aa, BK virus
LLYIIKKKATGRSCLP

SEQ ID NO: 34165 - protein, 16 aa, BK virus
LYIIKKKATGRSCLPM

SEQ ID NO: 34166 - protein, 16 aa, BK virus
YIIKKKATGRSCLPME

SEQ ID NO: 34167 - protein, 16 aa, BK virus
IIKKKATGRSCLPMEC

SEQ ID NO: 34168 - protein, 16 aa, BK virus
IKKKATGRSCLPMECS

SEQ ID NO: 34169 - protein, 16 aa, BK virus
KKKATGRSCLPMECSQ

SEQ ID NO: 34170 - protein, 16 aa, BK virus
KKATGRSCLPMECSQT

SEQ ID NO: 34171 - protein, 16 aa, BK virus
KATGRSCLPMECSQTM

SEQ ID NO: 34172 - protein, 16 aa, BK virus
ATGRSCLPMECSQTMT

SEQ ID NO: 34173 - protein, 16 aa, BK virus
TGRSCLPMECSQTMTS

SEQ ID NO: 34174 - protein, 16 aa, BK virus
GRSCLPMECSQTMTSG

SEQ ID NO: 34175 - protein, 16 aa, BK virus
RSCLPMECSQTMTSGR

SEQ ID NO: 34176 - protein, 16 aa, BK virus
SCLPMECSQTMTSGRK

SEQ ID NO: 34177 - protein, 16 aa, BK virus
CLPMECSQTMTSGRKV

SEQ ID NO: 34178 - protein, 16 aa, BK virus
LPMECSQTMTSGRKVH

SEQ ID NO: 34179 - protein, 16 aa, BK virus
PMECSQTMTSGRKVHD

SEQ ID NO: 34180 - protein, 16 aa, BK virus
MECSQTMTSGRKVHDS

SEQ ID NO: 34181 - protein, 16 aa, BK virus
ECSQTMTSGRKVHDSQ

SEQ ID NO: 34182 - protein, 16 aa, BK virus
CSQTMTSGRKVHDSQG

SEQ ID NO: 34183 - protein, 16 aa, BK virus
SQTMTSGRKVHDSQGN

SEQ ID NO: 34184 - protein, 16 aa, BK virus
QTMTSGRKVHDSQGNA

SEQ ID NO: 34185 - protein, 16 aa, BK virus
TMTSGRKVHDSQGNAA

SEQ ID NO: 34186 - protein, 16 aa, BK virus
MTSGRKVHDSQGNAAK

SEQ ID NO: 34187 - protein, 16 aa, BK virus
TSGRKVHDSQGNAAKP

SEQ ID NO: 34188 - protein, 16 aa, BK virus
PQEGKCMTHREELLTH

SEQ ID NO: 34189 - protein, 16 aa, BK virus
QEGKCMTHREELLTHG

SEQ ID NO: 34190 - protein, 16 aa, BK virus
EGKCMTHREELLTHGM

SEQ ID NO: 34191 - protein, 16 aa, BK virus
GKCMTHREELLTHGMQ

SEQ ID NO: 34192 - protein, 16 aa, BK virus
KCMTHREELLTHGMQP

SEQ ID NO: 34193 - protein, 16 aa, BK virus
CMTHREELLTHGMQPN

SEQ ID NO: 34194 - protein, 16 aa, BK virus
MTHREELLTHGMQPNH

SEQ ID NO: 34195 - protein, 16 aa, BK virus
THREELLTHGMQPNHD

SEQ ID NO: 34196 - protein, 16 aa, BK virus
HREELLTHGMQPNHDL

SEQ ID NO: 34197 - protein, 16 aa, BK virus
REELLTHGMQPNHDLR

SEQ ID NO: 34198 - protein, 16 aa, BK virus
EELLTHGMQPNHDLRK

SEQ ID NO: 34199 - protein, 16 aa, BK virus
ELLTHGMQPNHDLRKE

SEQ ID NO: 34200 - protein, 16 aa, BK virus
LLTHGMQPNHDLRKES

SEQ ID NO: 34201 - protein, 16 aa, BK virus
LTHGMQPNHDLRKESA

SEQ ID NO: 34202 - protein, 16 aa, BK virus
QTCFASLGILALSPVK

SEQ ID NO: 34203 - protein, 16 aa, BK virus
TCFASLGILALSPVKL

SEQ ID NO: 34204 - protein, 16 aa, BK virus
CFASLGILALSPVKLD

SEQ ID NO: 34205 - protein, 16 aa, BK virus
FASLGILALSPVKLDK

SEQ ID NO: 34206 - protein, 16 aa, BK virus
ASLGILALSPVKLDKG

SEQ ID NO: 34207 - protein, 16 aa, BK virus
SLGILALSPVKLDKGH

SEQ ID NO: 34208 - protein, 16 aa, BK virus
LGILALSPVKLDKGHG

SEQ ID NO: 34209 - protein, 16 aa, BK virus
GILALSPVKLDKGHGS

SEQ ID NO: 34210 - protein, 16 aa, BK virus
ILALSPVKLDKGHGSA

SEQ ID NO: 34211 - protein, 16 aa, BK virus
LALSPVKLDKGHGSAP

SEQ ID NO: 34212 - protein, 16 aa, BK virus
ALSPVKLDKGHGSAPA

SEQ ID NO: 34213 - protein, 16 aa, BK virus
LSPVKLDKGHGSAPAV

SEQ ID NO: 34214 - protein, 16 aa, BK virus
SPVKLDKGHGSAPAVT

SEQ ID NO: 34215 - protein, 16 aa, BK virus
PVKLDKGHGSAPAVTT

SEQ ID NO: 34216 - protein, 16 aa, BK virus
VKLDKGHGSAPAVTTS

SEQ ID NO: 34217 - protein, 16 aa, BK virus
KLDKGHGSAPAVTTSF

SEQ ID NO: 34218 - protein, 16 aa, BK virus
LDKGHGSAPAVTTSFS

SEQ ID NO: 34219 - protein, 16 aa, BK virus
DKGHGSAPAVTTSFSE

SEQ ID NO: 34220 - protein, 16 aa, BK virus
KGHGSAPAVTTSFSES

SEQ ID NO: 34221 - protein, 16 aa, BK virus
GHGSAPAVTTSFSESW

SEQ ID NO: 34222 - protein, 16 aa, BK virus
NLDWNKKKSSEDFYFY

SEQ ID NO: 34223 - protein, 16 aa, BK virus
LDWNKKKSSEDFYFYF

SEQ ID NO: 34224 - protein, 16 aa, BK virus
DWNKKKSSEDFYFYFR

SEQ ID NO: 34225 - protein, 16 aa, BK virus
WNKKKSSEDFYFYFRA

SEQ ID NO: 34226 - protein, 16 aa, BK virus
NKKKSSEDFYFYFRAF

SEQ ID NO: 34227 - protein, 16 aa, BK virus
KKKSSEDFYFYFRAFA

SEQ ID NO: 34228 - protein, 16 aa, BK virus
KKSSEDFYFYFRAFAG

SEQ ID NO: 34229 - protein, 16 aa, BK virus
KSSEDFYFYFRAFAGI

SEQ ID NO: 34230 - protein, 16 aa, BK virus
SSEDFYFYFRAFAGIL

SEQ ID NO: 34231 - protein, 16 aa, BK virus
RQCRREKQKYHCFTCC

SEQ ID NO: 34232 - protein, 16 aa, BK virus
QCRREKQKYHCFTCCK

SEQ ID NO: 34233 - protein, 16 aa, BK virus
CRREKQKYHCFTCCKR

SEQ ID NO: 34234 - protein, 16 aa, BK virus
RREKQKYHCFTCCKRL

SEQ ID NO: 34235 - protein, 16 aa, BK virus
REKQKYHCFTCCKRLC

SEQ ID NO: 34236 - protein, 16 aa, BK virus
EKQKYHCFTCCKRLCK

SEQ ID NO: 34237 - protein, 16 aa, BK virus
KQKYHCFTCCKRLCKR

SEQ ID NO: 34238 - protein, 16 aa, BK virus
QKYHCFTCCKRLCKRL

SEQ ID NO: 34239 - protein, 16 aa, BK virus
KYHCFTCCKRLCKRLL

SEQ ID NO: 34240 - protein, 16 aa, BK virus
YHCFTCCKRLCKRLLG

SEQ ID NO: 34241 - protein, 16 aa, BK virus
HCFTCCKRLCKRLLGK

SEQ ID NO: 34242 - protein, 16 aa, BK virus
SLFFCISRFMGAALAL

SEQ ID NO: 34243 - protein, 16 aa, BK virus
LFFCISRFMGAALALL

SEQ ID NO: 34244 - protein, 16 aa, BK virus
FFCISRFMGAALALLG

SEQ ID NO: 34245 - protein, 16 aa, BK virus
FCISRFMGAALALLGD

SEQ ID NO: 34246 - protein, 16 aa, BK virus
CISRFMGAALALLGDL

SEQ ID NO: 34247 - protein, 16 aa, BK virus
ISRFMGAALALLGDLV

SEQ ID NO: 34248 - protein, 16 aa, BK virus
SRFMGAALALLGDLVA

SEQ ID NO: 34249 - protein, 16 aa, BK virus
RFMGAALALLGDLVAS

SEQ ID NO: 34250 - protein, 16 aa, BK virus
FMGAALALLGDLVASV

SEQ ID NO: 34251 - protein, 16 aa, BK virus
MGAALALLGDLVASVS

SEQ ID NO: 34252 - protein, 16 aa, BK virus
GAALALLGDLVASVSE

SEQ ID NO: 34253 - protein, 16 aa, BK virus
AALALLGDLVASVSEA

SEQ ID NO: 34254 - protein, 16 aa, BK virus
ALALLGDLVASVSEAA

SEQ ID NO: 34255 - protein, 16 aa, BK virus
LALLGDLVASVSEAAA

SEQ ID NO: 34256 - protein, 16 aa, BK virus
ALLGDLVASVSEAAAA

SEQ ID NO: 34257 - protein, 16 aa, BK virus
LLGDLVASVSEAAAAT

SEQ ID NO: 34258 - protein, 16 aa, BK virus
LGDLVASVSEAAAATG

SEQ ID NO: 34259 - protein, 16 aa, BK virus
GDLVASVSEAAAATGF

SEQ ID NO: 34260 - protein, 16 aa, BK virus
DLVASVSEAAAATGFS

SEQ ID NO: 34261 - protein, 16 aa, BK virus
LVASVSEAAAATGFSV

SEQ ID NO: 34262 - protein, 16 aa, BK virus
VASVSEAAAATGFSVA

SEQ ID NO: 34263 - protein, 16 aa, BK virus
ASVSEAAAATGFSVAE

SEQ ID NO: 34264 - protein, 16 aa, BK virus
SVSEAAAATGFSVAEI

SEQ ID NO: 34265 - protein, 16 aa, BK virus
VSEAAAATGFSVAEIA

SEQ ID NO: 34266 - protein, 16 aa, BK virus
SEAAAATGFSVAEIAA

SEQ ID NO: 34267 - protein, 16 aa, BK virus
EAAAATGFSVAEIAAG

SEQ ID NO: 34268 - protein, 16 aa, BK virus
AAAATGFSVAEIAAGE

SEQ ID NO: 34269 - protein, 16 aa, BK virus
AAATGFSVAEIAAGEA

SEQ ID NO: 34270 - protein, 16 aa, BK virus
AATGFSVAEIAAGEAA

SEQ ID NO: 34271 - protein, 16 aa, BK virus
ATGFSVAEIAAGEAAA

SEQ ID NO: 34272 - protein, 16 aa, BK virus
TGFSVAEIAAGEAAAA

SEQ ID NO: 34273 - protein, 16 aa, BK virus
GFSVAEIAAGEAAAAI

SEQ ID NO: 34274 - protein, 16 aa, BK virus
FSVAEIAAGEAAAAIE

SEQ ID NO: 34275 - protein, 16 aa, BK virus
SVAEIAAGEAAAAIEV

SEQ ID NO: 34276 - protein, 16 aa, BK virus
VAEIAAGEAAAAIEVQ

SEQ ID NO: 34277 - protein, 16 aa, BK virus
AEIAAGEAAAAIEVQI

SEQ ID NO: 34278 - protein, 16 aa, BK virus
EIAAGEAAAAIEVQIA

SEQ ID NO: 34279 - protein, 16 aa, BK virus
IAAGEAAAAIEVQIAS

SEQ ID NO: 34280 - protein, 16 aa, BK virus
AAGEAAAAIEVQIASL

SEQ ID NO: 34281 - protein, 16 aa, BK virus
AGEAAAAIEVQIASLA

SEQ ID NO: 34282 - protein, 16 aa, BK virus
GEAAAAIEVQIASLAT

SEQ ID NO: 34283 - protein, 16 aa, BK virus
EAAAAIEVQIASLATV

SEQ ID NO: 34284 - protein, 16 aa, BK virus
AAAAIEVQIASLATVE

SEQ ID NO: 34285 - protein, 16 aa, BK virus
AAAIEVQIASLATVEG

SEQ ID NO: 34286 - protein, 16 aa, BK virus
AAIEVQIASLATVEGI

SEQ ID NO: 34287 - protein, 16 aa, BK virus
AIEVQIASLATVEGIT

SEQ ID NO: 34288 - protein, 16 aa, BK virus
IEVQIASLATVEGITS

SEQ ID NO: 34289 - protein, 16 aa, BK virus
EVQIASLATVEGITST

SEQ ID NO: 34290 - protein, 16 aa, BK virus
VQIASLATVEGITSTS

SEQ ID NO: 34291 - protein, 16 aa, BK virus
QIASLATVEGITSTSE

SEQ ID NO: 34292 - protein, 16 aa, BK virus
IASLATVEGITSTSEA

SEQ ID NO: 34293 - protein, 16 aa, BK virus
ASLATVEGITSTSEAI

SEQ ID NO: 34294 - protein, 16 aa, BK virus
SLATVEGITSTSEAIA

SEQ ID NO: 34295 - protein, 16 aa, BK virus
LATVEGITSTSEAIAA

SEQ ID NO: 34296 - protein, 16 aa, BK virus
ATVEGITSTSEAIAAI

SEQ ID NO: 34297 - protein, 16 aa, BK virus
TVEGITSTSEAIAAIG

SEQ ID NO: 34298 - protein, 16 aa, BK virus
VEGITSTSEAIAAIGL

SEQ ID NO: 34299 - protein, 16 aa, BK virus
EGITSTSEAIAAIGLT

SEQ ID NO: 34300 - protein, 16 aa, BK virus
GITSTSEAIAAIGLTP

SEQ ID NO: 34301 - protein, 16 aa, BK virus
ITSTSEAIAAIGLTPQ

SEQ ID NO: 34302 - protein, 16 aa, BK virus
TSTSEAIAAIGLTPQT

SEQ ID NO: 34303 - protein, 16 aa, BK virus
STSEAIAAIGLTPQTY

SEQ ID NO: 34304 - protein, 16 aa, BK virus
TSEAIAAIGLTPQTYA

SEQ ID NO: 34305 - protein, 16 aa, BK virus
SEAIAAIGLTPQTYAV

SEQ ID NO: 34306 - protein, 16 aa, BK virus
EAIAAIGLTPQTYAVI

SEQ ID NO: 34307 - protein, 16 aa, BK virus
AIAAIGLTPQTYAVIA

SEQ ID NO: 34308 - protein, 16 aa, BK virus
IAAIGLTPQTYAVIAG

SEQ ID NO: 34309 - protein, 16 aa, BK virus
AAIGLTPQTYAVIAGA

SEQ ID NO: 34310 - protein, 16 aa, BK virus
AIGLTPQTYAVIAGAP

SEQ ID NO: 34311 - protein, 16 aa, BK virus
IGLTPQTYAVIAGAPG

SEQ ID NO: 34312 - protein, 16 aa, BK virus
GLTPQTYAVIAGAPGA

SEQ ID NO: 34313 - protein, 16 aa, BK virus
LTPQTYAVIAGAPGAI

SEQ ID NO: 34314 - protein, 16 aa, BK virus
TPQTYAVIAGAPGAIA

SEQ ID NO: 34315 - protein, 16 aa, BK virus
PQTYAVIAGAPGAIAG

SEQ ID NO: 34316 - protein, 16 aa, BK virus
QTYAVIAGAPGAIAGF

SEQ ID NO: 34317 - protein, 16 aa, BK virus
TYAVIAGAPGAIAGFA

SEQ ID NO: 34318 - protein, 16 aa, BK virus
YAVIAGAPGAIAGFAA

SEQ ID NO: 34319 - protein, 16 aa, BK virus
AVIAGAPGAIAGFAAL

SEQ ID NO: 34320 - protein, 16 aa, BK virus
VIAGAPGAIAGFAALI

SEQ ID NO: 34321 - protein, 16 aa, BK virus
IAGAPGAIAGFAALIQ

SEQ ID NO: 34322 - protein, 16 aa, BK virus
AGAPGAIAGFAALIQT

SEQ ID NO: 34323 - protein, 16 aa, BK virus
GAPGAIAGFAALIQTV

SEQ ID NO: 34324 - protein, 16 aa, BK virus
APGAIAGFAALIQTVS

SEQ ID NO: 34325 - protein, 16 aa, BK virus
PGAIAGFAALIQTVSG

SEQ ID NO: 34326 - protein, 16 aa, BK virus
GAIAGFAALIQTVSGI

SEQ ID NO: 34327 - protein, 16 aa, BK virus
AIAGFAALIQTVSGIS

SEQ ID NO: 34328 - protein, 16 aa, BK virus
IAGFAALIQTVSGISS

SEQ ID NO: 34329 - protein, 16 aa, BK virus
AGFAALIQTVSGISSL

SEQ ID NO: 34330 - protein, 16 aa, BK virus
GFAALIQTVSGISSLA

SEQ ID NO: 34331 - protein, 16 aa, BK virus
FAALIQTVSGISSLAQ

SEQ ID NO: 34332 - protein, 16 aa, BK virus
AALIQTVSGISSLAQV

SEQ ID NO: 34333 - protein, 16 aa, BK virus
ALIQTVSGISSLAQVG

SEQ ID NO: 34334 - protein, 16 aa, BK virus
LIQTVSGISSLAQVGY

SEQ ID NO: 34335 - protein, 16 aa, BK virus
IQTVSGISSLAQVGYK

SEQ ID NO: 34336 - protein, 16 aa, BK virus
QTVSGISSLAQVGYKF

SEQ ID NO: 34337 - protein, 16 aa, BK virus
TVSGISSLAQVGYKFF

SEQ ID NO: 34338 - protein, 16 aa, BK virus
VSGISSLAQVGYKFFD

SEQ ID NO: 34339 - protein, 16 aa, BK virus
SGISSLAQVGYKFFDD

SEQ ID NO: 34340 - protein, 16 aa, BK virus
GISSLAQVGYKFFDDW

SEQ ID NO: 34341 - protein, 16 aa, BK virus
ISSLAQVGYKFFDDWD

SEQ ID NO: 34342 - protein, 16 aa, BK virus
SSLAQVGYKFFDDWDH

SEQ ID NO: 34343 - protein, 16 aa, BK virus
SLAQVGYKFFDDWDHK

SEQ ID NO: 34344 - protein, 16 aa, BK virus
LAQVGYKFFDDWDHKV

SEQ ID NO: 34345 - protein, 16 aa, BK virus
AQVGYKFFDDWDHKVS

SEQ ID NO: 34346 - protein, 16 aa, BK virus
QVGYKFFDDWDHKVST

SEQ ID NO: 34347 - protein, 16 aa, BK virus
VGYKFFDDWDHKVSTV

SEQ ID NO: 34348 - protein, 16 aa, BK virus
GYKFFDDWDHKVSTVG

SEQ ID NO: 34349 - protein, 16 aa, BK virus
YKFFDDWDHKVSTVGL

SEQ ID NO: 34350 - protein, 16 aa, BK virus
KFFDDWDHKVSTVGLY

SEQ ID NO: 34351 - protein, 16 aa, BK virus
FFDDWDHKVSTVGLYQ

SEQ ID NO: 34352 - protein, 16 aa, BK virus
FDDWDHKVSTVGLYQQ

SEQ ID NO: 34353 - protein, 16 aa, BK virus
DDWDHKVSTVGLYQQS

SEQ ID NO: 34354 - protein, 16 aa, BK virus
DWDHKVSTVGLYQQSG

SEQ ID NO: 34355 - protein, 16 aa, BK virus
WDHKVSTVGLYQQSGM

SEQ ID NO: 34356 - protein, 16 aa, BK virus
DHKVSTVGLYQQSGMA

SEQ ID NO: 34357 - protein, 16 aa, BK virus
HKVSTVGLYQQSGMAL

SEQ ID NO: 34358 - protein, 16 aa, BK virus
KVSTVGLYQQSGMALE

SEQ ID NO: 34359 - protein, 16 aa, BK virus
VSTVGLYQQSGMALEL

SEQ ID NO: 34360 - protein, 16 aa, BK virus
STVGLYQQSGMALELF

SEQ ID NO: 34361 - protein, 16 aa, BK virus
TVGLYQQSGMALELFN

SEQ ID NO: 34362 - protein, 16 aa, BK virus
VGLYQQSGMALELFNP

SEQ ID NO: 34363 - protein, 16 aa, BK virus
GLYQQSGMALELFNPD

SEQ ID NO: 34364 - protein, 16 aa, BK virus
LYQQSGMALELFNPDE

SEQ ID NO: 34365 - protein, 16 aa, BK virus
YQQSGMALELFNPDEY

SEQ ID NO: 34366 - protein, 16 aa, BK virus
QQSGMALELFNPDEYY

SEQ ID NO: 34367 - protein, 16 aa, BK virus
QSGMALELFNPDEYYD

SEQ ID NO: 34368 - protein, 16 aa, BK virus
SGMALELFNPDEYYDI

SEQ ID NO: 34369 - protein, 16 aa, BK virus
GMALELFNPDEYYDIL

SEQ ID NO: 34370 - protein, 16 aa, BK virus
MALELFNPDEYYDILF

SEQ ID NO: 34371 - protein, 16 aa, BK virus
ALELFNPDEYYDILFP

SEQ ID NO: 34372 - protein, 16 aa, BK virus
LELFNPDEYYDILFPG

SEQ ID NO: 34373 - protein, 16 aa, BK virus
ELFNPDEYYDILFPGV

SEQ ID NO: 34374 - protein, 16 aa, BK virus
LFNPDEYYDILFPGVN

SEQ ID NO: 34375 - protein, 16 aa, BK virus
FNPDEYYDILFPGVNT

SEQ ID NO: 34376 - protein, 16 aa, BK virus
NPDEYYDILFPGVNTF

SEQ ID NO: 34377 - protein, 16 aa, BK virus
PDEYYDILFPGVNTFV

SEQ ID NO: 34378 - protein, 16 aa, BK virus
DEYYDILFPGVNTFVN

SEQ ID NO: 34379 - protein, 16 aa, BK virus
EYYDILFPGVNTFVNN

SEQ ID NO: 34380 - protein, 16 aa, BK virus
YYDILFPGVNTFVNNI

SEQ ID NO: 34381 - protein, 16 aa, BK virus
YDILFPGVNTFVNNIQ

SEQ ID NO: 34382 - protein, 16 aa, BK virus
DILFPGVNTFVNNIQY

SEQ ID NO: 34383 - protein, 16 aa, BK virus
ILFPGVNTFVNNIQYL

SEQ ID NO: 34384 - protein, 16 aa, BK virus
LFPGVNTFVNNIQYLD

SEQ ID NO: 34385 - protein, 16 aa, BK virus
FPGVNTFVNNIQYLDP

SEQ ID NO: 34386 - protein, 16 aa, BK virus
PGVNTFVNNIQYLDPR

SEQ ID NO: 34387 - protein, 16 aa, BK virus
GVNTFVNNIQYLDPRH

SEQ ID NO: 34388 - protein, 16 aa, BK virus
VNTFVNNIQYLDPRHW

SEQ ID NO: 34389 - protein, 16 aa, BK virus
NTFVNNIQYLDPRHWG

SEQ ID NO: 34390 - protein, 16 aa, BK virus
TFVNNIQYLDPRHWGP

SEQ ID NO: 34391 - protein, 16 aa, BK virus
FVNNIQYLDPRHWGPS

SEQ ID NO: 34392 - protein, 16 aa, BK virus
VNNIQYLDPRHWGPSL

SEQ ID NO: 34393 - protein, 16 aa, BK virus
NNIQYLDPRHWGPSLF

SEQ ID NO: 34394 - protein, 16 aa, BK virus
NIQYLDPRHWGPSLFA

SEQ ID NO: 34395 - protein, 16 aa, BK virus
IQYLDPRHWGPSLFAT

SEQ ID NO: 34396 - protein, 16 aa, BK virus
QYLDPRHWGPSLFATI

SEQ ID NO: 34397 - protein, 16 aa, BK virus
YLDPRHWGPSLFATIS

SEQ ID NO: 34398 - protein, 16 aa, BK virus
LDPRHWGPSLFATISQ

SEQ ID NO: 34399 - protein, 16 aa, BK virus
DPRHWGPSLFATISQA

SEQ ID NO: 34400 - protein, 16 aa, BK virus
PRHWGPSLFATISQAL

SEQ ID NO: 34401 - protein, 16 aa, BK virus
RHWGPSLFATISQALW

SEQ ID NO: 34402 - protein, 16 aa, BK virus
HWGPSLFATISQALWH

SEQ ID NO: 34403 - protein, 16 aa, BK virus
WGPSLFATISQALWHV

SEQ ID NO: 34404 - protein, 16 aa, BK virus
GPSLFATISQALWHVI

SEQ ID NO: 34405 - protein, 16 aa, BK virus
PSLFATISQALWHVIR

SEQ ID NO: 34406 - protein, 16 aa, BK virus
SLFATISQALWHVIRD

SEQ ID NO: 34407 - protein, 16 aa, BK virus
LFATISQALWHVIRDD

SEQ ID NO: 34408 - protein, 16 aa, BK virus
FATISQALWHVIRDDI

SEQ ID NO: 34409 - protein, 16 aa, BK virus
ATISQALWHVIRDDIP

SEQ ID NO: 34410 - protein, 16 aa, BK virus
TISQALWHVIRDDIPS

SEQ ID NO: 34411 - protein, 16 aa, BK virus
ISQALWHVIRDDIPSI

SEQ ID NO: 34412 - protein, 16 aa, BK virus
SQALWHVIRDDIPSIT

SEQ ID NO: 34413 - protein, 16 aa, BK virus
QALWHVIRDDIPSITS

SEQ ID NO: 34414 - protein, 16 aa, BK virus
ALWHVIRDDIPSITSQ

SEQ ID NO: 34415 - protein, 16 aa, BK virus
LWHVIRDDIPSITSQE

SEQ ID NO: 34416 - protein, 16 aa, BK virus
WHVIRDDIPSITSQEL

SEQ ID NO: 34417 - protein, 16 aa, BK virus
HVIRDDIPSITSQELQ

SEQ ID NO: 34418 - protein, 16 aa, BK virus
VIRDDIPSITSQELQR

SEQ ID NO: 34419 - protein, 16 aa, BK virus
IRDDIPSITSQELQRR

SEQ ID NO: 34420 - protein, 16 aa, BK virus
RDDIPSITSQELQRRT

SEQ ID NO: 34421 - protein, 16 aa, BK virus
DDIPSITSQELQRRTE

SEQ ID NO: 34422 - protein, 16 aa, BK virus
DIPSITSQELQRRTER

SEQ ID NO: 34423 - protein, 16 aa, BK virus
IPSITSQELQRRTERF

SEQ ID NO: 34424 - protein, 16 aa, BK virus
PSITSQELQRRTERFF

SEQ ID NO: 34425 - protein, 16 aa, BK virus
SITSQELQRRTERFFR

SEQ ID NO: 34426 - protein, 16 aa, BK virus
ITSQELQRRTERFFRD

SEQ ID NO: 34427 - protein, 16 aa, BK virus
TSQELQRRTERFFRDS

SEQ ID NO: 34428 - protein, 16 aa, BK virus
SQELQRRTERFFRDSL

SEQ ID NO: 34429 - protein, 16 aa, BK virus
QELQRRTERFFRDSLA

SEQ ID NO: 34430 - protein, 16 aa, BK virus
ELQRRTERFFRDSLAR

SEQ ID NO: 34431 - protein, 16 aa, BK virus
LQRRTERFFRDSLARF

SEQ ID NO: 34432 - protein, 16 aa, BK virus
QRRTERFFRDSLARFL

SEQ ID NO: 34433 - protein, 16 aa, BK virus
RRTERFFRDSLARFLE

SEQ ID NO: 34434 - protein, 16 aa, BK virus
RTERFFRDSLARFLEE

SEQ ID NO: 34435 - protein, 16 aa, BK virus
TERFFRDSLARFLEET

SEQ ID NO: 34436 - protein, 16 aa, BK virus
ERFFRDSLARFLEETT

SEQ ID NO: 34437 - protein, 16 aa, BK virus
RFFRDSLARFLEETTW

SEQ ID NO: 34438 - protein, 16 aa, BK virus
FFRDSLARFLEETTWT

SEQ ID NO: 34439 - protein, 16 aa, BK virus
FRDSLARFLEETTWTI

SEQ ID NO: 34440 - protein, 16 aa, BK virus
RDSLARFLEETTWTIV

SEQ ID NO: 34441 - protein, 16 aa, BK virus
DSLARFLEETTWTIVN

SEQ ID NO: 34442 - protein, 16 aa, BK virus
SLARFLEETTWTIVNA

SEQ ID NO: 34443 - protein, 16 aa, BK virus
LARFLEETTWTIVNAP

SEQ ID NO: 34444 - protein, 16 aa, BK virus
ARFLEETTWTIVNAPI

SEQ ID NO: 34445 - protein, 16 aa, BK virus
RFLEETTWTIVNAPIN

SEQ ID NO: 34446 - protein, 16 aa, BK virus
FLEETTWTIVNAPINF

SEQ ID NO: 34447 - protein, 16 aa, BK virus
LEETTWTIVNAPINFY

SEQ ID NO: 34448 - protein, 16 aa, BK virus
EETTWTIVNAPINFYN

SEQ ID NO: 34449 - protein, 16 aa, BK virus
ETTWTIVNAPINFYNY

SEQ ID NO: 34450 - protein, 16 aa, BK virus
TTWTIVNAPINFYNYI

SEQ ID NO: 34451 - protein, 16 aa, BK virus
TWTIVNAPINFYNYIQ

SEQ ID NO: 34452 - protein, 16 aa, BK virus
WTIVNAPINFYNYIQQ

SEQ ID NO: 34453 - protein, 16 aa, BK virus
TIVNAPINFYNYIQQY

SEQ ID NO: 34454 - protein, 16 aa, BK virus
IVNAPINFYNYIQQYY

SEQ ID NO: 34455 - protein, 16 aa, BK virus
VNAPINFYNYIQQYYS

SEQ ID NO: 34456 - protein, 16 aa, BK virus
NAPINFYNYIQQYYSD

SEQ ID NO: 34457 - protein, 16 aa, BK virus
APINFYNYIQQYYSDL

SEQ ID NO: 34458 - protein, 16 aa, BK virus
PINFYNYIQQYYSDLS

SEQ ID NO: 34459 - protein, 16 aa, BK virus
INFYNYIQQYYSDLSP

SEQ ID NO: 34460 - protein, 16 aa, BK virus
NFYNYIQQYYSDLSPI

SEQ ID NO: 34461 - protein, 16 aa, BK virus
FYNYIQQYYSDLSPIR

SEQ ID NO: 34462 - protein, 16 aa, BK virus
YNYIQQYYSDLSPIRP

SEQ ID NO: 34463 - protein, 16 aa, BK virus
NYIQQYYSDLSPIRPS

SEQ ID NO: 34464 - protein, 16 aa, BK virus
YIQQYYSDLSPIRPSM

SEQ ID NO: 34465 - protein, 16 aa, BK virus
IQQYYSDLSPIRPSMV

SEQ ID NO: 34466 - protein, 16 aa, BK virus
QQYYSDLSPIRPSMVR

SEQ ID NO: 34467 - protein, 16 aa, BK virus
QYYSDLSPIRPSMVRQ

SEQ ID NO: 34468 - protein, 16 aa, BK virus
YYSDLSPIRPSMVRQV

SEQ ID NO: 34469 - protein, 16 aa, BK virus
YSDLSPIRPSMVRQVA

SEQ ID NO: 34470 - protein, 16 aa, BK virus
SDLSPIRPSMVRQVAE

SEQ ID NO: 34471 - protein, 16 aa, BK virus
DLSPIRPSMVRQVAER

SEQ ID NO: 34472 - protein, 16 aa, BK virus
LSPIRPSMVRQVAERE

SEQ ID NO: 34473 - protein, 16 aa, BK virus
SPIRPSMVRQVAEREG

SEQ ID NO: 34474 - protein, 16 aa, BK virus
PIRPSMVRQVAEREGT

SEQ ID NO: 34475 - protein, 16 aa, BK virus
IRPSMVRQVAEREGTR

SEQ ID NO: 34476 - protein, 16 aa, BK virus
RPSMVRQVAEREGTRV

SEQ ID NO: 34477 - protein, 16 aa, BK virus
PSMVRQVAEREGTRVH

SEQ ID NO: 34478 - protein, 16 aa, BK virus
SMVRQVAEREGTRVHF

SEQ ID NO: 34479 - protein, 16 aa, BK virus
MVRQVAEREGTRVHFG

SEQ ID NO: 34480 - protein, 16 aa, BK virus
VRQVAEREGTRVHFGH

SEQ ID NO: 34481 - protein, 16 aa, BK virus
RQVAEREGTRVHFGHT

SEQ ID NO: 34482 - protein, 16 aa, BK virus
QVAEREGTRVHFGHTY

SEQ ID NO: 34483 - protein, 16 aa, BK virus
VAEREGTRVHFGHTYS

SEQ ID NO: 34484 - protein, 16 aa, BK virus
AEREGTRVHFGHTYSI

SEQ ID NO: 34485 - protein, 16 aa, BK virus
EREGTRVHFGHTYSID

SEQ ID NO: 34486 - protein, 16 aa, BK virus
REGTRVHFGHTYSIDD

SEQ ID NO: 34487 - protein, 16 aa, BK virus
EGTRVHFGHTYSIDDA

SEQ ID NO: 34488 - protein, 16 aa, BK virus
GTRVHFGHTYSIDDAD

SEQ ID NO: 34489 - protein, 16 aa, BK virus
TRVHFGHTYSIDDADS

SEQ ID NO: 34490 - protein, 16 aa, BK virus
RVHFGHTYSIDDADSI

SEQ ID NO: 34491 - protein, 16 aa, BK virus
VHFGHTYSIDDADSIE

SEQ ID NO: 34492 - protein, 16 aa, BK virus
HFGHTYSIDDADSIEE

SEQ ID NO: 34493 - protein, 16 aa, BK virus
FGHTYSIDDADSIEEV

SEQ ID NO: 34494 - protein, 16 aa, BK virus
GHTYSIDDADSIEEVT

SEQ ID NO: 34495 - protein, 16 aa, BK virus
HTYSIDDADSIEEVTQ

SEQ ID NO: 34496 - protein, 16 aa, BK virus
TYSIDDADSIEEVTQR

SEQ ID NO: 34497 - protein, 16 aa, BK virus
YSIDDADSIEEVTQRM

SEQ ID NO: 34498 - protein, 16 aa, BK virus
SIDDADSIEEVTQRMD

SEQ ID NO: 34499 - protein, 16 aa, BK virus
IDDADSIEEVTQRMDL

SEQ ID NO: 34500 - protein, 16 aa, BK virus
DDADSIEEVTQRMDLR

SEQ ID NO: 34501 - protein, 16 aa, BK virus
DADSIEEVTQRMDLRN

SEQ ID NO: 34502 - protein, 16 aa, BK virus
ADSIEEVTQRMDLRNQ

SEQ ID NO: 34503 - protein, 16 aa, BK virus
DSIEEVTQRMDLRNQQ

SEQ ID NO: 34504 - protein, 16 aa, BK virus
SIEEVTQRMDLRNQQS

SEQ ID NO: 34505 - protein, 16 aa, BK virus
IEEVTQRMDLRNQQSV

SEQ ID NO: 34506 - protein, 16 aa, BK virus
EEVTQRMDLRNQQSVH

SEQ ID NO: 34507 - protein, 16 aa, BK virus
EVTQRMDLRNQQSVHS

SEQ ID NO: 34508 - protein, 16 aa, BK virus
VTQRMDLRNQQSVHSG

SEQ ID NO: 34509 - protein, 16 aa, BK virus
TQRMDLRNQQSVHSGE

SEQ ID NO: 34510 - protein, 16 aa, BK virus
QRMDLRNQQSVHSGEF

SEQ ID NO: 34511 - protein, 16 aa, BK virus
RMDLRNQQSVHSGEFI

SEQ ID NO: 34512 - protein, 16 aa, BK virus
MDLRNQQSVHSGEFIE

SEQ ID NO: 34513 - protein, 16 aa, BK virus
DLRNQQSVHSGEFIEK

SEQ ID NO: 34514 - protein, 16 aa, BK virus
LRNQQSVHSGEFIEKT

SEQ ID NO: 34515 - protein, 16 aa, BK virus
RNQQSVHSGEFIEKTI

SEQ ID NO: 34516 - protein, 16 aa, BK virus
NQQSVHSGEFIEKTIA

SEQ ID NO: 34517 - protein, 16 aa, BK virus
QQSVHSGEFIEKTIAP

SEQ ID NO: 34518 - protein, 16 aa, BK virus
QSVHSGEFIEKTIAPG

SEQ ID NO: 34519 - protein, 16 aa, BK virus
SVHSGEFIEKTIAPGG

SEQ ID NO: 34520 - protein, 16 aa, BK virus
VHSGEFIEKTIAPGGA

SEQ ID NO: 34521 - protein, 16 aa, BK virus
HSGEFIEKTIAPGGAN

SEQ ID NO: 34522 - protein, 16 aa, BK virus
SGEFIEKTIAPGGANQ

SEQ ID NO: 34523 - protein, 16 aa, BK virus
GEFIEKTIAPGGANQR

SEQ ID NO: 34524 - protein, 16 aa, BK virus
EFIEKTIAPGGANQRT

SEQ ID NO: 34525 - protein, 16 aa, BK virus
FIEKTIAPGGANQRTA

SEQ ID NO: 34526 - protein, 16 aa, BK virus
IEKTIAPGGANQRTAP

SEQ ID NO: 34527 - protein, 16 aa, BK virus
EKTIAPGGANQRTAPQ

SEQ ID NO: 34528 - protein, 16 aa, BK virus
KTIAPGGANQRTAPQW

SEQ ID NO: 34529 - protein, 16 aa, BK virus
TIAPGGANQRTAPQWM

SEQ ID NO: 34530 - protein, 16 aa, BK virus
IAPGGANQRTAPQWML

SEQ ID NO: 34531 - protein, 16 aa, BK virus
APGGANQRTAPQWMLP

SEQ ID NO: 34532 - protein, 16 aa, BK virus
PGGANQRTAPQWMLPL

SEQ ID NO: 34533 - protein, 16 aa, BK virus
GGANQRTAPQWMLPLL

SEQ ID NO: 34534 - protein, 16 aa, BK virus
GANQRTAPQWMLPLLL

SEQ ID NO: 34535 - protein, 16 aa, BK virus
ANQRTAPQWMLPLLLG

SEQ ID NO: 34536 - protein, 16 aa, BK virus
NQRTAPQWMLPLLLGL

SEQ ID NO: 34537 - protein, 16 aa, BK virus
QRTAPQWMLPLLLGLY

SEQ ID NO: 34538 - protein, 16 aa, BK virus
RTAPQWMLPLLLGLYG

SEQ ID NO: 34539 - protein, 16 aa, BK virus
TAPQWMLPLLLGLYGT

SEQ ID NO: 34540 - protein, 16 aa, BK virus
APQWMLPLLLGLYGTV

SEQ ID NO: 34541 - protein, 16 aa, BK virus
PQWMLPLLLGLYGTVT

SEQ ID NO: 34542 - protein, 16 aa, BK virus
QWMLPLLLGLYGTVTP

SEQ ID NO: 34543 - protein, 16 aa, BK virus
WMLPLLLGLYGTVTPA

SEQ ID NO: 34544 - protein, 16 aa, BK virus
MLPLLLGLYGTVTPAL

SEQ ID NO: 34545 - protein, 16 aa, BK virus
LPLLLGLYGTVTPALE

SEQ ID NO: 34546 - protein, 16 aa, BK virus
PLLLGLYGTVTPALEA

SEQ ID NO: 34547 - protein, 16 aa, BK virus
LLLGLYGTVTPALEAY

SEQ ID NO: 34548 - protein, 16 aa, BK virus
LLGLYGTVTPALEAYE

SEQ ID NO: 34549 - protein, 16 aa, BK virus
LGLYGTVTPALEAYED

SEQ ID NO: 34550 - protein, 16 aa, BK virus
GLYGTVTPALEAYEDG

SEQ ID NO: 34551 - protein, 16 aa, BK virus
LYGTVTPALEAYEDGP

SEQ ID NO: 34552 - protein, 16 aa, BK virus
YGTVTPALEAYEDGPN

SEQ ID NO: 34553 - protein, 16 aa, BK virus
GTVTPALEAYEDGPNQ

SEQ ID NO: 34554 - protein, 16 aa, BK virus
TVTPALEAYEDGPNQK

SEQ ID NO: 34555 - protein, 16 aa, BK virus
VTPALEAYEDGPNQKK

SEQ ID NO: 34556 - protein, 16 aa, BK virus
TPALEAYEDGPNQKKR

SEQ ID NO: 34557 - protein, 16 aa, BK virus
PALEAYEDGPNQKKRR

SEQ ID NO: 34558 - protein, 16 aa, BK virus
ALEAYEDGPNQKKRRV

SEQ ID NO: 34559 - protein, 16 aa, BK virus
LEAYEDGPNQKKRRVS

SEQ ID NO: 34560 - protein, 16 aa, BK virus
EAYEDGPNQKKRRVSR

SEQ ID NO: 34561 - protein, 16 aa, BK virus
AYEDGPNQKKRRVSRG

SEQ ID NO: 34562 - protein, 16 aa, BK virus
YEDGPNQKKRRVSRGS

SEQ ID NO: 34563 - protein, 16 aa, BK virus
EDGPNQKKRRVSRGSS

SEQ ID NO: 34564 - protein, 16 aa, BK virus
DGPNQKKRRVSRGSSQ

SEQ ID NO: 34565 - protein, 16 aa, BK virus
GPNQKKRRVSRGSSQK

SEQ ID NO: 34566 - protein, 16 aa, BK virus
PNQKKRRVSRGSSQKA

SEQ ID NO: 34567 - protein, 16 aa, BK virus
NQKKRRVSRGSSQKAK

SEQ ID NO: 34568 - protein, 16 aa, BK virus
QKKRRVSRGSSQKAKG

SEQ ID NO: 34569 - protein, 16 aa, BK virus
KKRRVSRGSSQKAKGT

SEQ ID NO: 34570 - protein, 16 aa, BK virus
KRRVSRGSSQKAKGTR

SEQ ID NO: 34571 - protein, 16 aa, BK virus
RRVSRGSSQKAKGTRA

SEQ ID NO: 34572 - protein, 16 aa, BK virus
RVSRGSSQKAKGTRAS

SEQ ID NO: 34573 - protein, 16 aa, BK virus
VSRGSSQKAKGTRASA

SEQ ID NO: 34574 - protein, 16 aa, BK virus
SRGSSQKAKGTRASAK

SEQ ID NO: 34575 - protein, 16 aa, BK virus
RGSSQKAKGTRASAKT

SEQ ID NO: 34576 - protein, 16 aa, BK virus
GSSQKAKGTRASAKTT

SEQ ID NO: 34577 - protein, 16 aa, BK virus
SSQKAKGTRASAKTTN

SEQ ID NO: 34578 - protein, 16 aa, BK virus
SQKAKGTRASAKTTNK

SEQ ID NO: 34579 - protein, 16 aa, BK virus
QKAKGTRASAKTTNKR

SEQ ID NO: 34580 - protein, 16 aa, BK virus
KAKGTRASAKTTNKRR

SEQ ID NO: 34581 - protein, 16 aa, BK virus
AKGTRASAKTTNKRRS

SEQ ID NO: 34582 - protein, 16 aa, BK virus
KGTRASAKTTNKRRSR

SEQ ID NO: 34583 - protein, 16 aa, BK virus
GTRASAKTTNKRRSRS

SEQ ID NO: 34584 - protein, 16 aa, BK virus
TRASAKTTNKRRSRSS

SEQ ID NO: 34585 - protein, 16 aa, BK virus
RASAKTTNKRRSRSSR

SEQ ID NO: 34586 - protein, 16 aa, BK virus
ASAKTTNKRRSRSSRS

SEQ ID NO: 34587 - protein, 16 aa, BK virus
NWGRCYYRGRMLPKPR

SEQ ID NO: 34588 - protein, 16 aa, BK virus
WGRCYYRGRMLPKPRN

SEQ ID NO: 34589 - protein, 16 aa, BK virus
GRCYYRGRMLPKPRNG

SEQ ID NO: 34590 - protein, 16 aa, BK virus
RCYYRGRMLPKPRNGG

SEQ ID NO: 34591 - protein, 16 aa, BK virus
CYYRGRMLPKPRNGGS

SEQ ID NO: 34592 - protein, 16 aa, BK virus
YYRGRMLPKPRNGGSR

SEQ ID NO: 34593 - protein, 16 aa, BK virus
PREKNASLLQHSKNSP

SEQ ID NO: 34594 - protein, 16 aa, BK virus
REKNASLLQHSKNSPP

SEQ ID NO: 34595 - protein, 16 aa, BK virus
EKNASLLQHSKNSPPQ

SEQ ID NO: 34596 - protein, 16 aa, BK virus
KNASLLQHSKNSPPQF

SEQ ID NO: 34597 - protein, 16 aa, BK virus
NASLLQHSKNSPPQFK

SEQ ID NO: 34598 - protein, 16 aa, BK virus
GPNLWKSTDVGGCNCT

SEQ ID NO: 34599 - protein, 16 aa, BK virus
PNLWKSTDVGGCNCTN

SEQ ID NO: 34600 - protein, 16 aa, BK virus
NLWKSTDVGGCNCTNR

SEQ ID NO: 34601 - protein, 16 aa, BK virus
LWKSTDVGGCNCTNRG

SEQ ID NO: 34602 - protein, 16 aa, BK virus
WKSTDVGGCNCTNRGY

SEQ ID NO: 34603 - protein, 16 aa, BK virus
KSTDVGGCNCTNRGYW

SEQ ID NO: 34604 - protein, 16 aa, BK virus
STDVGGCNCTNRGYWN

SEQ ID NO: 34605 - protein, 16 aa, BK virus
TDVGGCNCTNRGYWNN

SEQ ID NO: 34606 - protein, 16 aa, BK virus
FPLLCCRWRTLGNAGS

SEQ ID NO: 34607 - protein, 16 aa, BK virus
PLLCCRWRTLGNAGSA

SEQ ID NO: 34608 - protein, 16 aa, BK virus
LLCCRWRTLGNAGSAN

SEQ ID NO: 34609 - protein, 16 aa, BK virus
LCCRWRTLGNAGSANE

SEQ ID NO: 34610 - protein, 16 aa, BK virus
CCRWRTLGNAGSANEL

SEQ ID NO: 34611 - protein, 16 aa, BK virus
CRWRTLGNAGSANELQ

SEQ ID NO: 34612 - protein, 16 aa, BK virus
RWRTLGNAGSANELQV

SEQ ID NO: 34613 - protein, 16 aa, BK virus
WRTLGNAGSANELQVK

SEQ ID NO: 34614 - protein, 16 aa, BK virus
RTLGNAGSANELQVKV

SEQ ID NO: 34615 - protein, 16 aa, BK virus
TLGNAGSANELQVKVP

SEQ ID NO: 34616 - protein, 16 aa, BK virus
VFWDFHRRGKCSPSTS

SEQ ID NO: 34617 - protein, 16 aa, BK virus
FWDFHRRGKCSPSTSC

SEQ ID NO: 34618 - protein, 16 aa, BK virus
WDFHRRGKCSPSTSCD

SEQ ID NO: 34619 - protein, 16 aa, BK virus
DFHRRGKCSPSTSCDQ

SEQ ID NO: 34620 - protein, 16 aa, BK virus
FHRRGKCSPSTSCDQH

SEQ ID NO: 34621 - protein, 16 aa, BK virus
HRRGKCSPSTSCDQHS

SEQ ID NO: 34622 - protein, 16 aa, BK virus
RRGKCSPSTSCDQHSY

SEQ ID NO: 34623 - protein, 16 aa, BK virus
RGKCSPSTSCDQHSYH

SEQ ID NO: 34624 - protein, 16 aa, BK virus
GKCSPSTSCDQHSYHS

SEQ ID NO: 34625 - protein, 16 aa, BK virus
KCSPSTSCDQHSYHSV

SEQ ID NO: 34626 - protein, 16 aa, BK virus
CSPSTSCDQHSYHSVA

SEQ ID NO: 34627 - protein, 16 aa, BK virus
SPSTSCDQHSYHSVAR

SEQ ID NO: 34628 - protein, 16 aa, BK virus
DPPEKKICKESLPNFL

SEQ ID NO: 34629 - protein, 16 aa, BK virus
PPEKKICKESLPNFLF

SEQ ID NO: 34630 - protein, 16 aa, BK virus
PEKKICKESLPNFLFA

SEQ ID NO: 34631 - protein, 16 aa, BK virus
EKKICKESLPNFLFAK

SEQ ID NO: 34632 - protein, 16 aa, BK virus
PYKQENPESGWAAYVW

SEQ ID NO: 34633 - protein, 16 aa, BK virus
YKQENPESGWAAYVWY

SEQ ID NO: 34634 - protein, 16 aa, BK virus
KQENPESGWAAYVWYG

SEQ ID NO: 34635 - protein, 16 aa, BK virus
QENPESGWAAYVWYGI

SEQ ID NO: 34636 - protein, 16 aa, BK virus
ENPESGWAAYVWYGIP

SEQ ID NO: 34637 - protein, 16 aa, BK virus
NPESGWAAYVWYGIPG

SEQ ID NO: 34638 - protein, 16 aa, BK virus
PESGWAAYVWYGIPGR

SEQ ID NO: 34639 - protein, 16 aa, BK virus
ESGWAAYVWYGIPGRR

SEQ ID NO: 34640 - protein, 16 aa, BK virus
SGWAAYVWYGIPGRRG

SEQ ID NO: 34641 - protein, 16 aa, BK virus
QTGTIANQNALNRCFY

SEQ ID NO: 34642 - protein, 16 aa, BK virus
TGTIANQNALNRCFYC

SEQ ID NO: 34643 - protein, 16 aa, BK virus
GTIANQNALNRCFYCT

SEQ ID NO: 34644 - protein, 16 aa, BK virus
TIANQNALNRCFYCTY

SEQ ID NO: 34645 - protein, 16 aa, BK virus
IANQNALNRCFYCTYT

SEQ ID NO: 34646 - protein, 16 aa, BK virus
ANQNALNRCFYCTYTF

SEQ ID NO: 34647 - protein, 16 aa, BK virus
NQNALNRCFYCTYTFN

SEQ ID NO: 34648 - protein, 16 aa, BK virus
QNALNRCFYCTYTFNK

SEQ ID NO: 34649 - protein, 16 aa, BK virus
NALNRCFYCTYTFNKC

SEQ ID NO: 34650 - protein, 16 aa, BK virus
ALNRCFYCTYTFNKCC

SEQ ID NO: 34651 - protein, 16 aa, BK virus
LNRCFYCTYTFNKCCF

SEQ ID NO: 34652 - protein, 16 aa, BK virus
NRCFYCTYTFNKCCFC

SEQ ID NO: 34653 - protein, 16 aa, BK virus
RCFYCTYTFNKCCFCI

SEQ ID NO: 34654 - protein, 16 aa, BK virus
CFYCTYTFNKCCFCIS

SEQ ID NO: 34655 - protein, 16 aa, BK virus
FYCTYTFNKCCFCISH

SEQ ID NO: 34656 - protein, 16 aa, BK virus
YCTYTFNKCCFCISHF

SEQ ID NO: 34657 - protein, 16 aa, BK virus
NTESLYTNATLDYGGL

SEQ ID NO: 34658 - protein, 16 aa, BK virus
TESLYTNATLDYGGLT

SEQ ID NO: 34659 - protein, 16 aa, BK virus
ESLYTNATLDYGGLTF

SEQ ID NO: 34660 - protein, 16 aa, BK virus
SLYTNATLDYGGLTFG

SEQ ID NO: 34661 - protein, 16 aa, BK virus
LYTNATLDYGGLTFGN

SEQ ID NO: 34662 - protein, 16 aa, BK virus
YTNATLDYGGLTFGNL

SEQ ID NO: 34663 - protein, 16 aa, BK virus
TNATLDYGGLTFGNLQ

SEQ ID NO: 34664 - protein, 16 aa, BK virus
NATLDYGGLTFGNLQQ

SEQ ID NO: 34665 - protein, 16 aa, BK virus
ATLDYGGLTFGNLQQG

SEQ ID NO: 34666 - protein, 16 aa, BK virus
TLDYGGLTFGNLQQGL

SEQ ID NO: 34667 - protein, 16 aa, BK virus
LDYGGLTFGNLQQGLK

SEQ ID NO: 34668 - protein, 16 aa, BK virus
DYGGLTFGNLQQGLKY

SEQ ID NO: 34669 - protein, 16 aa, BK virus
YGGLTFGNLQQGLKYL

SEQ ID NO: 34670 - protein, 16 aa, BK virus
GGLTFGNLQQGLKYLR

SEQ ID NO: 34671 - protein, 16 aa, BK virus
GLTFGNLQQGLKYLRL

SEQ ID NO: 34672 - protein, 16 aa, BK virus
LTFGNLQQGLKYLRLG

SEQ ID NO: 34673 - protein, 16 aa, BK virus
TFGNLQQGLKYLRLGK

SEQ ID NO: 34674 - protein, 16 aa, BK virus
FGNLQQGLKYLRLGKS

SEQ ID NO: 34675 - protein, 16 aa, BK virus
GNLQQGLKYLRLGKSI

SEQ ID NO: 34676 - protein, 16 aa, BK virus
NLQQGLKYLRLGKSIV

SEQ ID NO: 34677 - protein, 16 aa, BK virus
LQQGLKYLRLGKSIVI

SEQ ID NO: 34678 - protein, 16 aa, BK virus
QQGLKYLRLGKSIVIG

SEQ ID NO: 34679 - protein, 16 aa, BK virus
QGLKYLRLGKSIVIGI

SEQ ID NO: 34680 - protein, 16 aa, BK virus
GLKYLRLGKSIVIGIQ

SEQ ID NO: 34681 - protein, 16 aa, BK virus
LKYLRLGKSIVIGIQC

SEQ ID NO: 34682 - protein, 16 aa, BK virus
KYLRLGKSIVIGIQCL

SEQ ID NO: 34683 - protein, 16 aa, BK virus
YLRLGKSIVIGIQCLI

SEQ ID NO: 34684 - protein, 16 aa, BK virus
LRLGKSIVIGIQCLIH

SEQ ID NO: 34685 - protein, 16 aa, BK virus
RLGKSIVIGIQCLIHV

SEQ ID NO: 34686 - protein, 16 aa, BK virus
LGKSIVIGIQCLIHVQ

SEQ ID NO: 34687 - protein, 16 aa, BK virus
GKSIVIGIQCLIHVQS

SEQ ID NO: 34688 - protein, 16 aa, BK virus
KSIVIGIQCLIHVQSL

SEQ ID NO: 34689 - protein, 16 aa, BK virus
SIVIGIQCLIHVQSLQ

SEQ ID NO: 34690 - protein, 16 aa, BK virus
IVIGIQCLIHVQSLQF

SEQ ID NO: 34691 - protein, 16 aa, BK virus
VIGIQCLIHVQSLQFL

SEQ ID NO: 34692 - protein, 16 aa, BK virus
IGIQCLIHVQSLQFLN

SEQ ID NO: 34693 - protein, 16 aa, BK virus
GIQCLIHVQSLQFLNP

SEQ ID NO: 34694 - protein, 16 aa, BK virus
IQCLIHVQSLQFLNPL

SEQ ID NO: 34695 - protein, 16 aa, BK virus
QCLIHVQSLQFLNPLL

SEQ ID NO: 34696 - protein, 16 aa, BK virus
CLIHVQSLQFLNPLLL

SEQ ID NO: 34697 - protein, 16 aa, BK virus
YQEYISPCIYYISSLK

SEQ ID NO: 34698 - protein, 16 aa, BK virus
QEYISPCIYYISSLKK

SEQ ID NO: 34699 - protein, 16 aa, BK virus
EYISPCIYYISSLKKY

SEQ ID NO: 34700 - protein, 16 aa, BK virus
YISPCIYYISSLKKYT

SEQ ID NO: 34701 - protein, 16 aa, BK virus
ISPCIYYISSLKKYTY

SEQ ID NO: 34702 - protein, 16 aa, BK virus
SPCIYYISSLKKYTYL

SEQ ID NO: 34703 - protein, 16 aa, BK virus
PCIYYISSLKKYTYLS

SEQ ID NO: 34704 - protein, 16 aa, BK virus
CIYYISSLKKYTYLSQ

SEQ ID NO: 34705 - protein, 16 aa, BK virus
IYYISSLKKYTYLSQN

SEQ ID NO: 34706 - protein, 16 aa, BK virus
YYISSLKKYTYLSQNP

SEQ ID NO: 34707 - protein, 16 aa, BK virus
YISSLKKYTYLSQNPA

SEQ ID NO: 34708 - protein, 16 aa, BK virus
ISSLKKYTYLSQNPAF

SEQ ID NO: 34709 - protein, 16 aa, BK virus
SSLKKYTYLSQNPAFP

SEQ ID NO: 34710 - protein, 16 aa, BK virus
SLKKYTYLSQNPAFPS

SEQ ID NO: 34711 - protein, 16 aa, BK virus
LKKYTYLSQNPAFPSI

SEQ ID NO: 34712 - protein, 16 aa, BK virus
KKYTYLSQNPAFPSIQ

SEQ ID NO: 34713 - protein, 16 aa, BK virus
KYTYLSQNPAFPSIQQ

SEQ ID NO: 34714 - protein, 16 aa, BK virus
YTYLSQNPAFPSIQQF

SEQ ID NO: 34715 - protein, 16 aa, BK virus
TKLAVATRSFHFVKFF

SEQ ID NO: 34716 - protein, 16 aa, BK virus
KLAVATRSFHFVKFFF

SEQ ID NO: 34717 - protein, 16 aa, BK virus
LAVATRSFHFVKFFFQ

SEQ ID NO: 34718 - protein, 16 aa, BK virus
AVATRSFHFVKFFFQV

SEQ ID NO: 34719 - protein, 16 aa, BK virus
VATRSFHFVKFFFQVR

SEQ ID NO: 34720 - protein, 16 aa, BK virus
ATRSFHFVKFFFQVRT

SEQ ID NO: 34721 - protein, 16 aa, BK virus
TRSFHFVKFFFQVRTL

SEQ ID NO: 34722 - protein, 16 aa, BK virus
RSFHFVKFFFQVRTLS

SEQ ID NO: 34723 - protein, 16 aa, BK virus
SFHFVKFFFQVRTLSF

SEQ ID NO: 34724 - protein, 16 aa, BK virus
FHFVKFFFQVRTLSFV

SEQ ID NO: 34725 - protein, 16 aa, BK virus
HFVKFFFQVRTLSFVR

SEQ ID NO: 34726 - protein, 16 aa, BK virus
FVKFFFQVRTLSFVRI

SEQ ID NO: 34727 - protein, 16 aa, BK virus
VKFFFQVRTLSFVRIF

SEQ ID NO: 34728 - protein, 16 aa, BK virus
KFFFQVRTLSFVRIFL

SEQ ID NO: 34729 - protein, 16 aa, BK virus
FFFQVRTLSFVRIFLN

SEQ ID NO: 34730 - protein, 16 aa, BK virus
FFQVRTLSFVRIFLNI

SEQ ID NO: 34731 - protein, 16 aa, BK virus
FQVRTLSFVRIFLNIF

SEQ ID NO: 34732 - protein, 16 aa, BK virus
QVRTLSFVRIFLNIFW

SEQ ID NO: 34733 - protein, 16 aa, BK virus
VRTLSFVRIFLNIFWA

SEQ ID NO: 34734 - protein, 16 aa, BK virus
PSLVEIFGFFCLNVSF

SEQ ID NO: 34735 - protein, 16 aa, BK virus
SLVEIFGFFCLNVSFL

SEQ ID NO: 34736 - protein, 16 aa, BK virus
LVEIFGFFCLNVSFLN

SEQ ID NO: 34737 - protein, 16 aa, BK virus
VEIFGFFCLNVSFLNL

SEQ ID NO: 34738 - protein, 16 aa, BK virus
EIFGFFCLNVSFLNLP

SEQ ID NO: 34739 - protein, 16 aa, BK virus
HFHLNNLSNCLNCLFH

SEQ ID NO: 34740 - protein, 16 aa, BK virus
FHLNNLSNCLNCLFHV

SEQ ID NO: 34741 - protein, 16 aa, BK virus
HLNNLSNCLNCLFHVL

SEQ ID NO: 34742 - protein, 16 aa, BK virus
LNNLSNCLNCLFHVLK

SEQ ID NO: 34743 - protein, 16 aa, BK virus
NNLSNCLNCLFHVLKA

SEQ ID NO: 34744 - protein, 16 aa, BK virus
NLSNCLNCLFHVLKAN

SEQ ID NO: 34745 - protein, 16 aa, BK virus
LSNCLNCLFHVLKANP

SEQ ID NO: 34746 - protein, 16 aa, BK virus
SNCLNCLFHVLKANPL

SEQ ID NO: 34747 - protein, 16 aa, BK virus
NCLNCLFHVLKANPLI

SEQ ID NO: 34748 - protein, 16 aa, BK virus
CLNCLFHVLKANPLIQ

SEQ ID NO: 34749 - protein, 16 aa, BK virus
LNCLFHVLKANPLIQL

SEQ ID NO: 34750 - protein, 16 aa, BK virus
NCLFHVLKANPLIQLL

SEQ ID NO: 34751 - protein, 16 aa, BK virus
CLFHVLKANPLIQLLS

SEQ ID NO: 34752 - protein, 16 aa, BK virus
LFHVLKANPLIQLLSL

SEQ ID NO: 34753 - protein, 16 aa, BK virus
FHVLKANPLIQLLSLL

SEQ ID NO: 34754 - protein, 16 aa, BK virus
HVLKANPLIQLLSLLH

SEQ ID NO: 34755 - protein, 16 aa, BK virus
VLKANPLIQLLSLLHL

SEQ ID NO: 34756 - protein, 16 aa, BK virus
LKANPLIQLLSLLHLQ

SEQ ID NO: 34757 - protein, 16 aa, BK virus
KANPLIQLLSLLHLQK

SEQ ID NO: 34758 - protein, 16 aa, BK virus
ANPLIQLLSLLHLQKQ

SEQ ID NO: 34759 - protein, 16 aa, BK virus
NPLIQLLSLLHLQKQP

SEQ ID NO: 34760 - protein, 16 aa, BK virus
PLIQLLSLLHLQKQPC

SEQ ID NO: 34761 - protein, 16 aa, BK virus
LIQLLSLLHLQKQPCT

SEQ ID NO: 34762 - protein, 16 aa, BK virus
IQLLSLLHLQKQPCTD

SEQ ID NO: 34763 - protein, 16 aa, BK virus
QLLSLLHLQKQPCTDL

SEQ ID NO: 34764 - protein, 16 aa, BK virus
LHLAQRLAFPWVGLHL

SEQ ID NO: 34765 - protein, 16 aa, BK virus
HLAQRLAFPWVGLHLR

SEQ ID NO: 34766 - protein, 16 aa, BK virus
LAQRLAFPWVGLHLRL

SEQ ID NO: 34767 - protein, 16 aa, BK virus
AQRLAFPWVGLHLRLY

SEQ ID NO: 34768 - protein, 16 aa, BK virus
QRLAFPWVGLHLRLYH

SEQ ID NO: 34769 - protein, 16 aa, BK virus
RLAFPWVGLHLRLYHH

SEQ ID NO: 34770 - protein, 16 aa, BK virus
LAFPWVGLHLRLYHHT

SEQ ID NO: 34771 - protein, 16 aa, BK virus
AFPWVGLHLRLYHHTN

SEQ ID NO: 34772 - protein, 16 aa, BK virus
FPWVGLHLRLYHHTNL

SEQ ID NO: 34773 - protein, 16 aa, BK virus
PWVGLHLRLYHHTNLI

SEQ ID NO: 34774 - protein, 16 aa, BK virus
WVGLHLRLYHHTNLIT

SEQ ID NO: 34775 - protein, 16 aa, BK virus
VGLHLRLYHHTNLITL

SEQ ID NO: 34776 - protein, 16 aa, BK virus
GLHLRLYHHTNLITLQ

SEQ ID NO: 34777 - protein, 16 aa, BK virus
LHLRLYHHTNLITLQL

SEQ ID NO: 34778 - protein, 16 aa, BK virus
HLRLYHHTNLITLQLV

SEQ ID NO: 34779 - protein, 16 aa, BK virus
LRLYHHTNLITLQLVL

SEQ ID NO: 34780 - protein, 16 aa, BK virus
RLYHHTNLITLQLVLF

SEQ ID NO: 34781 - protein, 16 aa, BK virus
LYHHTNLITLQLVLFF

SEQ ID NO: 34782 - protein, 16 aa, BK virus
YHHTNLITLQLVLFFH

SEQ ID NO: 34783 - protein, 16 aa, BK virus
HHTNLITLQLVLFFHY

SEQ ID NO: 34784 - protein, 16 aa, BK virus
HTNLITLQLVLFFHYQ

SEQ ID NO: 34785 - protein, 16 aa, BK virus
TNLITLQLVLFFHYQW

SEQ ID NO: 34786 - protein, 16 aa, BK virus
NLITLQLVLFFHYQWD

SEQ ID NO: 34787 - protein, 16 aa, BK virus
LITLQLVLFFHYQWDL

SEQ ID NO: 34788 - protein, 16 aa, BK virus
VANSAAKQHLPYIVLV

SEQ ID NO: 34789 - protein, 16 aa, BK virus
ANSAAKQHLPYIVLVQ

SEQ ID NO: 34790 - protein, 16 aa, BK virus
NSAAKQHLPYIVLVQH

SEQ ID NO: 34791 - protein, 16 aa, BK virus
SAAKQHLPYIVLVQHF

SEQ ID NO: 34792 - protein, 16 aa, BK virus
AAKQHLPYIVLVQHFH

SEQ ID NO: 34793 - protein, 16 aa, BK virus
AKQHLPYIVLVQHFHE

SEQ ID NO: 34794 - protein, 16 aa, BK virus
KQHLPYIVLVQHFHEL

SEQ ID NO: 34795 - protein, 16 aa, BK virus
QHLPYIVLVQHFHELQ

SEQ ID NO: 34796 - protein, 16 aa, BK virus
HLPYIVLVQHFHELQI

SEQ ID NO: 34797 - protein, 16 aa, BK virus
LPYIVLVQHFHELQIL

SEQ ID NO: 34798 - protein, 16 aa, BK virus
PYIVLVQHFHELQILN

SEQ ID NO: 34799 - protein, 16 aa, BK virus
YIVLVQHFHELQILNP

SEQ ID NO: 34800 - protein, 16 aa, BK virus
IVLVQHFHELQILNPF

SEQ ID NO: 34801 - protein, 16 aa, BK virus
VLVQHFHELQILNPFY

SEQ ID NO: 34802 - protein, 16 aa, BK virus
LVQHFHELQILNPFYL

SEQ ID NO: 34803 - protein, 16 aa, BK virus
VQHFHELQILNPFYLI

SEQ ID NO: 34804 - protein, 16 aa, BK virus
QHFHELQILNPFYLIY

SEQ ID NO: 34805 - protein, 16 aa, BK virus
HFHELQILNPFYLIYD

SEQ ID NO: 34806 - protein, 16 aa, BK virus
IFLLAFLPWSYEGYLL

SEQ ID NO: 34807 - protein, 16 aa, BK virus
FLLAFLPWSYEGYLLF

SEQ ID NO: 34808 - protein, 16 aa, BK virus
LLAFLPWSYEGYLLFF

SEQ ID NO: 34809 - protein, 16 aa, BK virus
LKLYLLLADKYFFDFY

SEQ ID NO: 34810 - protein, 16 aa, BK virus
KLYLLLADKYFFDFYF

SEQ ID NO: 34811 - protein, 16 aa, BK virus
LYLLLADKYFFDFYFL

SEQ ID NO: 34812 - protein, 16 aa, BK virus
YLLLADKYFFDFYFLQ

SEQ ID NO: 34813 - protein, 16 aa, BK virus
LLLADKYFFDFYFLQK

SEQ ID NO: 34814 - protein, 16 aa, BK virus
SDKAGLFSDTFYTPLH

SEQ ID NO: 34815 - protein, 16 aa, BK virus
DKAGLFSDTFYTPLHC

SEQ ID NO: 34816 - protein, 16 aa, BK virus
KAGLFSDTFYTPLHCI

SEQ ID NO: 34817 - protein, 16 aa, BK virus
AGLFSDTFYTPLHCIE

SEQ ID NO: 34818 - protein, 16 aa, BK virus
GLFSDTFYTPLHCIEI

SEQ ID NO: 34819 - protein, 16 aa, BK virus
LFSDTFYTPLHCIEIL

SEQ ID NO: 34820 - protein, 16 aa, BK virus
FSDTFYTPLHCIEILN

SEQ ID NO: 34821 - protein, 16 aa, BK virus
SDTFYTPLHCIEILNT

SEQ ID NO: 34822 - protein, 16 aa, BK virus
DTFYTPLHCIEILNTY

SEQ ID NO: 34823 - protein, 16 aa, BK virus
TFYTPLHCIEILNTYL

SEQ ID NO: 34824 - protein, 16 aa, BK virus
FYTPLHCIEILNTYLI

SEQ ID NO: 34825 - protein, 16 aa, BK virus
YTPLHCIEILNTYLII

SEQ ID NO: 34826 - protein, 16 aa, BK virus
TPLHCIEILNTYLIIK

SEQ ID NO: 34827 - protein, 16 aa, BK virus
PLHCIEILNTYLIIKT

SEQ ID NO: 34828 - protein, 16 aa, BK virus
LHCIEILNTYLIIKTH

SEQ ID NO: 34829 - protein, 16 aa, BK virus
HCIEILNTYLIIKTHP

SEQ ID NO: 34830 - protein, 16 aa, BK virus
CIEILNTYLIIKTHPH

SEQ ID NO: 34831 - protein, 16 aa, BK virus
IEILNTYLIIKTHPHT

SEQ ID NO: 34832 - protein, 16 aa, BK virus
EILNTYLIIKTHPHTL

SEQ ID NO: 34833 - protein, 16 aa, BK virus
ILNTYLIIKTHPHTLS

SEQ ID NO: 34834 - protein, 16 aa, BK virus
LNTYLIIKTHPHTLSL

SEQ ID NO: 34835 - protein, 16 aa, BK virus
NTYLIIKTHPHTLSLL

SEQ ID NO: 34836 - protein, 16 aa, BK virus
TYLIIKTHPHTLSLLH

SEQ ID NO: 34837 - protein, 16 aa, BK virus
YLIIKTHPHTLSLLHT

SEQ ID NO: 34838 - protein, 16 aa, BK virus
LIIKTHPHTLSLLHTQ

SEQ ID NO: 34839 - protein, 16 aa, BK virus
GLLPFFFFWVVLSVEN

SEQ ID NO: 34840 - protein, 16 aa, BK virus
LLPFFFFWVVLSVENL

SEQ ID NO: 34841 - protein, 16 aa, BK virus
LPFFFFWVVLSVENLL

SEQ ID NO: 34842 - protein, 16 aa, BK virus
PFFFFWVVLSVENLLL

SEQ ID NO: 34843 - protein, 16 aa, BK virus
FFFFWVVLSVENLLLL

SEQ ID NO: 34844 - protein, 16 aa, BK virus
FFFWVVLSVENLLLLL

SEQ ID NO: 34845 - protein, 16 aa, BK virus
FFWVVLSVENLLLLLH

SEQ ID NO: 34846 - protein, 16 aa, BK virus
FWVVLSVENLLLLLHH

SEQ ID NO: 34847 - protein, 16 aa, BK virus
WVVLSVENLLLLLHHW

SEQ ID NO: 34848 - protein, 16 aa, BK virus
VVLSVENLLLLLHHWQ

SEQ ID NO: 34849 - protein, 16 aa, BK virus
VLSVENLLLLLHHWQT

SEQ ID NO: 34850 - protein, 16 aa, BK virus
LSVENLLLLLHHWQTY

SEQ ID NO: 34851 - protein, 16 aa, BK virus
SVENLLLLLHHWQTYL

SEQ ID NO: 34852 - protein, 16 aa, BK virus
VENLLLLLHHWQTYLH

SEQ ID NO: 34853 - protein, 16 aa, BK virus
ENLLLLLHHWQTYLHG

SEQ ID NO: 34854 - protein, 16 aa, BK virus
NLLLLLHHWQTYLHGK

SEQ ID NO: 34855 - protein, 16 aa, BK virus
LLLLLHHWQTYLHGKI

SEQ ID NO: 34856 - protein, 16 aa, BK virus
LLLLHHWQTYLHGKIN

SEQ ID NO: 34857 - protein, 16 aa, BK virus
LLLHHWQTYLHGKINL

SEQ ID NO: 34858 - protein, 16 aa, BK virus
LLHHWQTYLHGKINLH

SEQ ID NO: 34859 - protein, 16 aa, BK virus
LHHWQTYLHGKINLHP

SEQ ID NO: 34860 - protein, 16 aa, BK virus
HHWQTYLHGKINLHPI

SEQ ID NO: 34861 - protein, 16 aa, BK virus
HWQTYLHGKINLHPIF

SEQ ID NO: 34862 - protein, 16 aa, BK virus
WQTYLHGKINLHPIFH

SEQ ID NO: 34863 - protein, 16 aa, BK virus
RNSTRTPTLLFHRLAP

SEQ ID NO: 34864 - protein, 16 aa, BK virus
NSTRTPTLLFHRLAPI

SEQ ID NO: 34865 - protein, 16 aa, BK virus
STRTPTLLFHRLAPIK

SEQ ID NO: 34866 - protein, 16 aa, BK virus
TRTPTLLFHRLAPIKK

SEQ ID NO: 34867 - protein, 16 aa, BK virus
RTPTLLFHRLAPIKKI

SEQ ID NO: 34868 - protein, 16 aa, BK virus
TPTLLFHRLAPIKKII

SEQ ID NO: 34869 - protein, 16 aa, BK virus
PTLLFHRLAPIKKIIT

SEQ ID NO: 34870 - protein, 16 aa, BK virus
GLLIFYYLSKYKLVTL

SEQ ID NO: 34871 - protein, 16 aa, BK virus
LLIFYYLSKYKLVTLK

SEQ ID NO: 34872 - protein, 16 aa, BK virus
LIFYYLSKYKLVTLKL

SEQ ID NO: 34873 - protein, 16 aa, BK virus
ISEGSFSNYLDPPLQS

SEQ ID NO: 34874 - protein, 16 aa, BK virus
SEGSFSNYLDPPLQSF

SEQ ID NO: 34875 - protein, 16 aa, BK virus
EGSFSNYLDPPLQSFF

SEQ ID NO: 34876 - protein, 16 aa, BK virus
GSFSNYLDPPLQSFFS

SEQ ID NO: 34877 - protein, 16 aa, BK virus
AKPLCEAVNAVAIYPN

SEQ ID NO: 34878 - protein, 16 aa, BK virus
KPLCEAVNAVAIYPNQ

SEQ ID NO: 34879 - protein, 16 aa, BK virus
PLCEAVNAVAIYPNQG

SEQ ID NO: 34880 - protein, 16 aa, BK virus
LCEAVNAVAIYPNQGL

SEQ ID NO: 34881 - protein, 16 aa, BK virus
CEAVNAVAIYPNQGLF

SEQ ID NO: 34882 - protein, 16 aa, BK virus
EAVNAVAIYPNQGLFS

SEQ ID NO: 34883 - protein, 16 aa, BK virus
HARAVHRRLFGTNRPF

SEQ ID NO: 34884 - protein, 16 aa, BK virus
ARAVHRRLFGTNRPFL

SEQ ID NO: 34885 - protein, 16 aa, BK virus
RAVHRRLFGTNRPFLA

SEQ ID NO: 34886 - protein, 16 aa, BK virus
AVHRRLFGTNRPFLAV

SEQ ID NO: 34887 - protein, 16 aa, BK virus
VHRRLFGTNRPFLAVQ

SEQ ID NO: 34888 - protein, 16 aa, BK virus
HRRLFGTNRPFLAVQG

SEQ ID NO: 34889 - protein, 16 aa, BK virus
RRLFGTNRPFLAVQGI

SEQ ID NO: 34890 - protein, 16 aa, BK virus
RLFGTNRPFLAVQGIW

SEQ ID NO: 34891 - protein, 16 aa, BK virus
LFGTNRPFLAVQGIWA

SEQ ID NO: 34892 - protein, 16 aa, BK virus
FGTNRPFLAVQGIWAK

SEQ ID NO: 34893 - protein, 16 aa, BK virus
GTNRPFLAVQGIWAKR

SEQ ID NO: 34894 - protein, 16 aa, BK virus
TNRPFLAVQGIWAKRK

SEQ ID NO: 34895 - protein, 16 aa, BK virus
NRPFLAVQGIWAKRKI

SEQ ID NO: 34896 - protein, 16 aa, BK virus
RPFLAVQGIWAKRKIS

SEQ ID NO: 34897 - protein, 16 aa, BK virus
PFLAVQGIWAKRKIST

SEQ ID NO: 34898 - protein, 16 aa, BK virus
FLAVQGIWAKRKISTN

SEQ ID NO: 34899 - protein, 16 aa, BK virus
LAVQGIWAKRKISTNL

SEQ ID NO: 34900 - protein, 16 aa, BK virus
ATPGSKIRLMSYLYIL

SEQ ID NO: 34901 - protein, 16 aa, BK virus
TPGSKIRLMSYLYILL

SEQ ID NO: 34902 - protein, 16 aa, BK virus
PGSKIRLMSYLYILLH

SEQ ID NO: 34903 - protein, 16 aa, BK virus
GSKIRLMSYLYILLHF

SEQ ID NO: 34904 - protein, 16 aa, BK virus
SKIRLMSYLYILLHFF

SEQ ID NO: 34905 - protein, 16 aa, BK virus
KIRLMSYLYILLHFFI

SEQ ID NO: 34906 - protein, 16 aa, BK virus
IRLMSYLYILLHFFIQ

SEQ ID NO: 34907 - protein, 16 aa, BK virus
RLMSYLYILLHFFIQS

SEQ ID NO: 34908 - protein, 16 aa, BK virus
LMSYLYILLHFFIQSI

SEQ ID NO: 34909 - protein, 16 aa, BK virus
MSYLYILLHFFIQSIH

SEQ ID NO: 34910 - protein, 16 aa, BK virus
SYLYILLHFFIQSIHS

SEQ ID NO: 34911 - protein, 16 aa, BK virus
YLYILLHFFIQSIHSL

SEQ ID NO: 34912 - protein, 16 aa, BK virus
LYILLHFFIQSIHSLH

SEQ ID NO: 34913 - protein, 16 aa, BK virus
YILLHFFIQSIHSLHF

SEQ ID NO: 34914 - protein, 16 aa, BK virus
ILLHFFIQSIHSLHFI

SEQ ID NO: 34915 - protein, 16 aa, BK virus
LLHFFIQSIHSLHFIL

SEQ ID NO: 34916 - protein, 16 aa, BK virus
LHFFIQSIHSLHFILV

SEQ ID NO: 34917 - protein, 16 aa, BK virus
HFFIQSIHSLHFILVA

SEQ ID NO: 34918 - protein, 16 aa, BK virus
FFIQSIHSLHFILVAP

SEQ ID NO: 34919 - protein, 16 aa, BK virus
FIQSIHSLHFILVAPF

SEQ ID NO: 34920 - protein, 16 aa, BK virus
IQSIHSLHFILVAPFV

SEQ ID NO: 34921 - protein, 16 aa, BK virus
QSIHSLHFILVAPFVR

SEQ ID NO: 34922 - protein, 16 aa, BK virus
SIHSLHFILVAPFVRV

SEQ ID NO: 34923 - protein, 16 aa, BK virus
IHSLHFILVAPFVRVK

SEQ ID NO: 34924 - protein, 16 aa, BK virus
HSLHFILVAPFVRVKF

SEQ ID NO: 34925 - protein, 16 aa, BK virus
SLHFILVAPFVRVKFL

SEQ ID NO: 34926 - protein, 16 aa, BK virus
LHFILVAPFVRVKFLT

SEQ ID NO: 34927 - protein, 15 aa, BK virus
HFILVAPFVRVKFLT

SEQ ID NO: 34928 - protein, 13 aa, BK virus
MDKVLNREESMEL

SEQ ID NO: 34929 - protein, 13 aa, BK virus
DKVLNREESMELM

SEQ ID NO: 34930 - protein, 13 aa, BK virus
KVLNREESMELMD

SEQ ID NO: 34931 - protein, 13 aa, BK virus
VLNREESMELMDL

SEQ ID NO: 34932 - protein, 13 aa, BK virus
LNREESMELMDLL

SEQ ID NO: 34933 - protein, 13 aa, BK virus
NREESMELMDLLG

SEQ ID NO: 34934 - protein, 13 aa, BK virus
REESMELMDLLGL

SEQ ID NO: 34935 - protein, 13 aa, BK virus
EESMELMDLLGLE

SEQ ID NO: 34936 - protein, 13 aa, BK virus
ESMELMDLLGLER

SEQ ID NO: 34937 - protein, 13 aa, BK virus
SMELMDLLGLERA

SEQ ID NO: 34938 - protein, 13 aa, BK virus
MELMDLLGLERAA

SEQ ID NO: 34939 - protein, 13 aa, BK virus
ELMDLLGLERAAW

SEQ ID NO: 34940 - protein, 13 aa, BK virus
LMDLLGLERAAWG

SEQ ID NO: 34941 - protein, 13 aa, BK virus
MDLLGLERAAWGN

SEQ ID NO: 34942 - protein, 13 aa, BK virus
DLLGLERAAWGNL

SEQ ID NO: 34943 - protein, 13 aa, BK virus
LLGLERAAWGNLP

SEQ ID NO: 34944 - protein, 13 aa, BK virus
LGLERAAWGNLPL

SEQ ID NO: 34945 - protein, 13 aa, BK virus
GLERAAWGNLPLM

SEQ ID NO: 34946 - protein, 13 aa, BK virus
LERAAWGNLPLMR

SEQ ID NO: 34947 - protein, 13 aa, BK virus
ERAAWGNLPLMRK

SEQ ID NO: 34948 - protein, 13 aa, BK virus
RAAWGNLPLMRKA

SEQ ID NO: 34949 - protein, 13 aa, BK virus
AAWGNLPLMRKAY

SEQ ID NO: 34950 - protein, 13 aa, BK virus
AWGNLPLMRKAYL

SEQ ID NO: 34951 - protein, 13 aa, BK virus
WGNLPLMRKAYLR

SEQ ID NO: 34952 - protein, 13 aa, BK virus
GNLPLMRKAYLRK

SEQ ID NO: 34953 - protein, 13 aa, BK virus
NLPLMRKAYLRKC

SEQ ID NO: 34954 - protein, 13 aa, BK virus
LPLMRKAYLRKCK

SEQ ID NO: 34955 - protein, 13 aa, BK virus
PLMRKAYLRKCKE

SEQ ID NO: 34956 - protein, 13 aa, BK virus
LMRKAYLRKCKEF

SEQ ID NO: 34957 - protein, 13 aa, BK virus
MRKAYLRKCKEFH

SEQ ID NO: 34958 - protein, 13 aa, BK virus
RKAYLRKCKEFHP

SEQ ID NO: 34959 - protein, 13 aa, BK virus
KAYLRKCKEFHPD

SEQ ID NO: 34960 - protein, 13 aa, BK virus
AYLRKCKEFHPDK

SEQ ID NO: 34961 - protein, 13 aa, BK virus
YLRKCKEFHPDKG

SEQ ID NO: 34962 - protein, 13 aa, BK virus
LRKCKEFHPDKGG

SEQ ID NO: 34963 - protein, 13 aa, BK virus
RKCKEFHPDKGGD

SEQ ID NO: 34964 - protein, 13 aa, BK virus
KCKEFHPDKGGDE

SEQ ID NO: 34965 - protein, 13 aa, BK virus
CKEFHPDKGGDED

SEQ ID NO: 34966 - protein, 13 aa, BK virus
KEFHPDKGGDEDK

SEQ ID NO: 34967 - protein, 13 aa, BK virus
EFHPDKGGDEDKM

SEQ ID NO: 34968 - protein, 13 aa, BK virus
FHPDKGGDEDKMK

SEQ ID NO: 34969 - protein, 13 aa, BK virus
HPDKGGDEDKMKR

SEQ ID NO: 34970 - protein, 13 aa, BK virus
PDKGGDEDKMKRM

SEQ ID NO: 34971 - protein, 13 aa, BK virus
DKGGDEDKMKRMN

SEQ ID NO: 34972 - protein, 13 aa, BK virus
KGGDEDKMKRMNT

SEQ ID NO: 34973 - protein, 13 aa, BK virus
GGDEDKMKRMNTL

SEQ ID NO: 34974 - protein, 13 aa, BK virus
GDEDKMKRMNTLY

SEQ ID NO: 34975 - protein, 13 aa, BK virus
DEDKMKRMNTLYK

SEQ ID NO: 34976 - protein, 13 aa, BK virus
EDKMKRMNTLYKK

SEQ ID NO: 34977 - protein, 13 aa, BK virus
DKMKRMNTLYKKM

SEQ ID NO: 34978 - protein, 13 aa, BK virus
KMKRMNTLYKKME

SEQ ID NO: 34979 - protein, 13 aa, BK virus
MKRMNTLYKKMEQ

SEQ ID NO: 34980 - protein, 13 aa, BK virus
KRMNTLYKKMEQD

SEQ ID NO: 34981 - protein, 13 aa, BK virus
RMNTLYKKMEQDV

SEQ ID NO: 34982 - protein, 13 aa, BK virus
MNTLYKKMEQDVK

SEQ ID NO: 34983 - protein, 13 aa, BK virus
NTLYKKMEQDVKV

SEQ ID NO: 34984 - protein, 13 aa, BK virus
TLYKKMEQDVKVA

SEQ ID NO: 34985 - protein, 13 aa, BK virus
LYKKMEQDVKVAH

SEQ ID NO: 34986 - protein, 13 aa, BK virus
YKKMEQDVKVAHQ

SEQ ID NO: 34987 - protein, 13 aa, BK virus
KKMEQDVKVAHQP

SEQ ID NO: 34988 - protein, 13 aa, BK virus
KMEQDVKVAHQPD

SEQ ID NO: 34989 - protein, 13 aa, BK virus
MEQDVKVAHQPDF

SEQ ID NO: 34990 - protein, 13 aa, BK virus
EQDVKVAHQPDFG

SEQ ID NO: 34991 - protein, 13 aa, BK virus
QDVKVAHQPDFGT

SEQ ID NO: 34992 - protein, 13 aa, BK virus
DVKVAHQPDFGTW

SEQ ID NO: 34993 - protein, 13 aa, BK virus
VKVAHQPDFGTWS

SEQ ID NO: 34994 - protein, 13 aa, BK virus
KVAHQPDFGTWSS

SEQ ID NO: 34995 - protein, 13 aa, BK virus
VAHQPDFGTWSSS

SEQ ID NO: 34996 - protein, 13 aa, BK virus
AHQPDFGTWSSSE

SEQ ID NO: 34997 - protein, 13 aa, BK virus
HQPDFGTWSSSEV

SEQ ID NO: 34998 - protein, 13 aa, BK virus
QPDFGTWSSSEVC

SEQ ID NO: 34999 - protein, 13 aa, BK virus
PDFGTWSSSEVCA

SEQ ID NO: 35000 - protein, 13 aa, BK virus
DFGTWSSSEVCAD

SEQ ID NO: 35001 - protein, 13 aa, BK virus
FGTWSSSEVCADF

SEQ ID NO: 35002 - protein, 13 aa, BK virus
GTWSSSEVCADFP

SEQ ID NO: 35003 - protein, 13 aa, BK virus
TWSSSEVCADFPL

SEQ ID NO: 35004 - protein, 13 aa, BK virus
WSSSEVCADFPLC

SEQ ID NO: 35005 - protein, 13 aa, BK virus
SSSEVCADFPLCP

SEQ ID NO: 35006 - protein, 13 aa, BK virus
SSEVCADFPLCPD

SEQ ID NO: 35007 - protein, 13 aa, BK virus
SEVCADFPLCPDT

SEQ ID NO: 35008 - protein, 13 aa, BK virus
EVCADFPLCPDTL

SEQ ID NO: 35009 - protein, 13 aa, BK virus
VCADFPLCPDTLY

SEQ ID NO: 35010 - protein, 13 aa, BK virus
CADFPLCPDTLYC

SEQ ID NO: 35011 - protein, 13 aa, BK virus
ADFPLCPDTLYCK

SEQ ID NO: 35012 - protein, 13 aa, BK virus
DFPLCPDTLYCKE

SEQ ID NO: 35013 - protein, 13 aa, BK virus
FPLCPDTLYCKEW

SEQ ID NO: 35014 - protein, 13 aa, BK virus
PLCPDTLYCKEWP

SEQ ID NO: 35015 - protein, 13 aa, BK virus
LCPDTLYCKEWPI

SEQ ID NO: 35016 - protein, 13 aa, BK virus
CPDTLYCKEWPIC

SEQ ID NO: 35017 - protein, 13 aa, BK virus
PDTLYCKEWPICS

SEQ ID NO: 35018 - protein, 13 aa, BK virus
DTLYCKEWPICSK

SEQ ID NO: 35019 - protein, 13 aa, BK virus
TLYCKEWPICSKK

SEQ ID NO: 35020 - protein, 13 aa, BK virus
LYCKEWPICSKKP

SEQ ID NO: 35021 - protein, 13 aa, BK virus
YCKEWPICSKKPS

SEQ ID NO: 35022 - protein, 13 aa, BK virus
CKEWPICSKKPSV

SEQ ID NO: 35023 - protein, 13 aa, BK virus
KEWPICSKKPSVH

SEQ ID NO: 35024 - protein, 13 aa, BK virus
EWPICSKKPSVHC

SEQ ID NO: 35025 - protein, 13 aa, BK virus
WPICSKKPSVHCP

SEQ ID NO: 35026 - protein, 13 aa, BK virus
PICSKKPSVHCPC

SEQ ID NO: 35027 - protein, 13 aa, BK virus
ICSKKPSVHCPCM

SEQ ID NO: 35028 - protein, 13 aa, BK virus
CSKKPSVHCPCML

SEQ ID NO: 35029 - protein, 13 aa, BK virus
SKKPSVHCPCMLC

SEQ ID NO: 35030 - protein, 13 aa, BK virus
KKPSVHCPCMLCQ

SEQ ID NO: 35031 - protein, 13 aa, BK virus
KPSVHCPCMLCQL

SEQ ID NO: 35032 - protein, 13 aa, BK virus
PSVHCPCMLCQLR

SEQ ID NO: 35033 - protein, 13 aa, BK virus
SVHCPCMLCQLRL

SEQ ID NO: 35034 - protein, 13 aa, BK virus
VHCPCMLCQLRLR

SEQ ID NO: 35035 - protein, 13 aa, BK virus
HCPCMLCQLRLRH

SEQ ID NO: 35036 - protein, 13 aa, BK virus
CPCMLCQLRLRHL

SEQ ID NO: 35037 - protein, 13 aa, BK virus
PCMLCQLRLRHLN

SEQ ID NO: 35038 - protein, 13 aa, BK virus
CMLCQLRLRHLNR

SEQ ID NO: 35039 - protein, 13 aa, BK virus
MLCQLRLRHLNRK

SEQ ID NO: 35040 - protein, 13 aa, BK virus
LCQLRLRHLNRKF

SEQ ID NO: 35041 - protein, 13 aa, BK virus
CQLRLRHLNRKFL

SEQ ID NO: 35042 - protein, 13 aa, BK virus
QLRLRHLNRKFLR

SEQ ID NO: 35043 - protein, 13 aa, BK virus
LRLRHLNRKFLRK

SEQ ID NO: 35044 - protein, 13 aa, BK virus
RLRHLNRKFLRKE

SEQ ID NO: 35045 - protein, 13 aa, BK virus
LRHLNRKFLRKEP

SEQ ID NO: 35046 - protein, 13 aa, BK virus
RHLNRKFLRKEPL

SEQ ID NO: 35047 - protein, 13 aa, BK virus
HLNRKFLRKEPLV

SEQ ID NO: 35048 - protein, 13 aa, BK virus
LNRKFLRKEPLVW

SEQ ID NO: 35049 - protein, 13 aa, BK virus
NRKFLRKEPLVWI

SEQ ID NO: 35050 - protein, 13 aa, BK virus
RKFLRKEPLVWID

SEQ ID NO: 35051 - protein, 13 aa, BK virus
KFLRKEPLVWIDC

SEQ ID NO: 35052 - protein, 13 aa, BK virus
FLRKEPLVWIDCY

SEQ ID NO: 35053 - protein, 13 aa, BK virus
LRKEPLVWIDCYC

SEQ ID NO: 35054 - protein, 13 aa, BK virus
RKEPLVWIDCYCI

SEQ ID NO: 35055 - protein, 13 aa, BK virus
KEPLVWIDCYCID

SEQ ID NO: 35056 - protein, 13 aa, BK virus
EPLVWIDCYCIDC

SEQ ID NO: 35057 - protein, 13 aa, BK virus
PLVWIDCYCIDCF

SEQ ID NO: 35058 - protein, 13 aa, BK virus
LVWIDCYCIDCFT

SEQ ID NO: 35059 - protein, 13 aa, BK virus
VWIDCYCIDCFTQ

SEQ ID NO: 35060 - protein, 13 aa, BK virus
WIDCYCIDCFTQW

SEQ ID NO: 35061 - protein, 13 aa, BK virus
IDCYCIDCFTQWF

SEQ ID NO: 35062 - protein, 13 aa, BK virus
DCYCIDCFTQWFG

SEQ ID NO: 35063 - protein, 13 aa, BK virus
CYCIDCFTQWFGL

SEQ ID NO: 35064 - protein, 13 aa, BK virus
YCIDCFTQWFGLD

SEQ ID NO: 35065 - protein, 13 aa, BK virus
CIDCFTQWFGLDL

SEQ ID NO: 35066 - protein, 13 aa, BK virus
IDCFTQWFGLDLT

SEQ ID NO: 35067 - protein, 13 aa, BK virus
DCFTQWFGLDLTE

SEQ ID NO: 35068 - protein, 13 aa, BK virus
CFTQWFGLDLTEE

SEQ ID NO: 35069 - protein, 13 aa, BK virus
FTQWFGLDLTEET

SEQ ID NO: 35070 - protein, 13 aa, BK virus
TQWFGLDLTEETL

SEQ ID NO: 35071 - protein, 13 aa, BK virus
QWFGLDLTEETLQ

SEQ ID NO: 35072 - protein, 13 aa, BK virus
WFGLDLTEETLQW

SEQ ID NO: 35073 - protein, 13 aa, BK virus
FGLDLTEETLQWW

SEQ ID NO: 35074 - protein, 13 aa, BK virus
GLDLTEETLQWWV

SEQ ID NO: 35075 - protein, 13 aa, BK virus
LDLTEETLQWWVQ

SEQ ID NO: 35076 - protein, 13 aa, BK virus
DLTEETLQWWVQI

SEQ ID NO: 35077 - protein, 13 aa, BK virus
LTEETLQWWVQII

SEQ ID NO: 35078 - protein, 13 aa, BK virus
TEETLQWWVQIIG

SEQ ID NO: 35079 - protein, 13 aa, BK virus
EETLQWWVQIIGE

SEQ ID NO: 35080 - protein, 13 aa, BK virus
ETLQWWVQIIGET

SEQ ID NO: 35081 - protein, 13 aa, BK virus
TLQWWVQIIGETP

SEQ ID NO: 35082 - protein, 13 aa, BK virus
LQWWVQIIGETPF

SEQ ID NO: 35083 - protein, 13 aa, BK virus
QWWVQIIGETPFR

SEQ ID NO: 35084 - protein, 13 aa, BK virus
WWVQIIGETPFRD

SEQ ID NO: 35085 - protein, 13 aa, BK virus
WVQIIGETPFRDL

SEQ ID NO: 35086 - protein, 13 aa, BK virus
VQIIGETPFRDLK

SEQ ID NO: 35087 - protein, 13 aa, BK virus
QIIGETPFRDLKL

SEQ ID NO: 35088 - protein, 13 aa, BK virus
KALSNYFFYRCQP

SEQ ID NO: 35089 - protein, 13 aa, BK virus
ALSNYFFYRCQPM

SEQ ID NO: 35090 - protein, 13 aa, BK virus
LSNYFFYRCQPME

SEQ ID NO: 35091 - protein, 13 aa, BK virus
SNYFFYRCQPMEQ

SEQ ID NO: 35092 - protein, 13 aa, BK virus
NYFFYRCQPMEQK

SEQ ID NO: 35093 - protein, 13 aa, BK virus
YFFYRCQPMEQKS

SEQ ID NO: 35094 - protein, 13 aa, BK virus
FFYRCQPMEQKSG

SEQ ID NO: 35095 - protein, 13 aa, BK virus
FYRCQPMEQKSGS

SEQ ID NO: 35096 - protein, 13 aa, BK virus
YRCQPMEQKSGSP

SEQ ID NO: 35097 - protein, 13 aa, BK virus
RCQPMEQKSGSPG

SEQ ID NO: 35098 - protein, 13 aa, BK virus
CQPMEQKSGSPGG

SEQ ID NO: 35099 - protein, 13 aa, BK virus
QPMEQKSGSPGGV

SEQ ID NO: 35100 - protein, 13 aa, BK virus
PMEQKSGSPGGVP

SEQ ID NO: 35101 - protein, 13 aa, BK virus
MEQKSGSPGGVPL

SEQ ID NO: 35102 - protein, 13 aa, BK virus
EQKSGSPGGVPLM

SEQ ID NO: 35103 - protein, 13 aa, BK virus
QKSGSPGGVPLMK

SEQ ID NO: 35104 - protein, 13 aa, BK virus
KSGSPGGVPLMKN

SEQ ID NO: 35105 - protein, 13 aa, BK virus
SGSPGGVPLMKNG

SEQ ID NO: 35106 - protein, 13 aa, BK virus
GSPGGVPLMKNGM

SEQ ID NO: 35107 - protein, 13 aa, BK virus
SPGGVPLMKNGMK

SEQ ID NO: 35108 - protein, 13 aa, BK virus
PGGVPLMKNGMKI

SEQ ID NO: 35109 - protein, 13 aa, BK virus
GGVPLMKNGMKIY

SEQ ID NO: 35110 - protein, 13 aa, BK virus
GVPLMKNGMKIYF

SEQ ID NO: 35111 - protein, 13 aa, BK virus
VPLMKNGMKIYFA

SEQ ID NO: 35112 - protein, 13 aa, BK virus
PLMKNGMKIYFAM

SEQ ID NO: 35113 - protein, 13 aa, BK virus
LMKNGMKIYFAMK

SEQ ID NO: 35114 - protein, 13 aa, BK virus
MKNGMKIYFAMKI

SEQ ID NO: 35115 - protein, 13 aa, BK virus
KNGMKIYFAMKIC

SEQ ID NO: 35116 - protein, 13 aa, BK virus
NGMKIYFAMKICL

SEQ ID NO: 35117 - protein, 13 aa, BK virus
GMKIYFAMKICLP

SEQ ID NO: 35118 - protein, 13 aa, BK virus
MKIYFAMKICLPV

SEQ ID NO: 35119 - protein, 13 aa, BK virus
KIYFAMKICLPVM

SEQ ID NO: 35120 - protein, 13 aa, BK virus
IYFAMKICLPVMK

SEQ ID NO: 35121 - protein, 13 aa, BK virus
YFAMKICLPVMKK

SEQ ID NO: 35122 - protein, 13 aa, BK virus
FAMKICLPVMKKQ

SEQ ID NO: 35123 - protein, 13 aa, BK virus
AMKICLPVMKKQQ

SEQ ID NO: 35124 - protein, 13 aa, BK virus
MKICLPVMKKQQQ

SEQ ID NO: 35125 - protein, 13 aa, BK virus
KICLPVMKKQQQI

SEQ ID NO: 35126 - protein, 13 aa, BK virus
ICLPVMKKQQQIL

SEQ ID NO: 35127 - protein, 13 aa, BK virus
CLPVMKKQQQILN

SEQ ID NO: 35128 - protein, 13 aa, BK virus
LPVMKKQQQILNT

SEQ ID NO: 35129 - protein, 13 aa, BK virus
PVMKKQQQILNTQ

SEQ ID NO: 35130 - protein, 13 aa, BK virus
VMKKQQQILNTQH

SEQ ID NO: 35131 - protein, 13 aa, BK virus
MKKQQQILNTQHH

SEQ ID NO: 35132 - protein, 13 aa, BK virus
KKQQQILNTQHHP

SEQ ID NO: 35133 - protein, 13 aa, BK virus
KQQQILNTQHHPK

SEQ ID NO: 35134 - protein, 13 aa, BK virus
QQQILNTQHHPKK

SEQ ID NO: 35135 - protein, 13 aa, BK virus
QQILNTQHHPKKK

SEQ ID NO: 35136 - protein, 13 aa, BK virus
QILNTQHHPKKKE

SEQ ID NO: 35137 - protein, 13 aa, BK virus
ILNTQHHPKKKER

SEQ ID NO: 35138 - protein, 13 aa, BK virus
KTLKTFPLIYTSF

SEQ ID NO: 35139 - protein, 13 aa, BK virus
TLKTFPLIYTSFL

SEQ ID NO: 35140 - protein, 13 aa, BK virus
LKTFPLIYTSFLV

SEQ ID NO: 35141 - protein, 13 aa, BK virus
KTFPLIYTSFLVK

SEQ ID NO: 35142 - protein, 13 aa, BK virus
TFPLIYTSFLVKL

SEQ ID NO: 35143 - protein, 13 aa, BK virus
FPLIYTSFLVKLY

SEQ ID NO: 35144 - protein, 13 aa, BK virus
PLIYTSFLVKLYL

SEQ ID NO: 35145 - protein, 13 aa, BK virus
LIYTSFLVKLYLV

SEQ ID NO: 35146 - protein, 13 aa, BK virus
IYTSFLVKLYLVI

SEQ ID NO: 35147 - protein, 13 aa, BK virus
YTSFLVKLYLVIE

SEQ ID NO: 35148 - protein, 13 aa, BK virus
TSFLVKLYLVIEP

SEQ ID NO: 35149 - protein, 13 aa, BK virus
SFLVKLYLVIEPL

SEQ ID NO: 35150 - protein, 13 aa, BK virus
FLVKLYLVIEPLP

SEQ ID NO: 35151 - protein, 13 aa, BK virus
LVKLYLVIEPLPA

SEQ ID NO: 35152 - protein, 13 aa, BK virus
VKLYLVIEPLPAL

SEQ ID NO: 35153 - protein, 13 aa, BK virus
KLYLVIEPLPALL

SEQ ID NO: 35154 - protein, 13 aa, BK virus
LYLVIEPLPALLC

SEQ ID NO: 35155 - protein, 13 aa, BK virus
YLVIEPLPALLCI

SEQ ID NO: 35156 - protein, 13 aa, BK virus
LVIEPLPALLCIL

SEQ ID NO: 35157 - protein, 13 aa, BK virus
VIEPLPALLCILL

SEQ ID NO: 35158 - protein, 13 aa, BK virus
IEPLPALLCILLK

SEQ ID NO: 35159 - protein, 13 aa, BK virus
EPLPALLCILLKK

SEQ ID NO: 35160 - protein, 13 aa, BK virus
PLPALLCILLKKK

SEQ ID NO: 35161 - protein, 13 aa, BK virus
LPALLCILLKKKL

SEQ ID NO: 35162 - protein, 13 aa, BK virus
PALLCILLKKKLK

SEQ ID NO: 35163 - protein, 13 aa, BK virus
ALLCILLKKKLKF

SEQ ID NO: 35164 - protein, 13 aa, BK virus
LLCILLKKKLKFC

SEQ ID NO: 35165 - protein, 13 aa, BK virus
LCILLKKKLKFCI

SEQ ID NO: 35166 - protein, 13 aa, BK virus
CILLKKKLKFCIK

SEQ ID NO: 35167 - protein, 13 aa, BK virus
ILLKKKLKFCIKN

SEQ ID NO: 35168 - protein, 13 aa, BK virus
LLKKKLKFCIKNL

SEQ ID NO: 35169 - protein, 13 aa, BK virus
LKKKLKFCIKNLW

SEQ ID NO: 35170 - protein, 13 aa, BK virus
KKKLKFCIKNLWK

SEQ ID NO: 35171 - protein, 13 aa, BK virus
KKLKFCIKNLWKN

SEQ ID NO: 35172 - protein, 13 aa, BK virus
KLKFCIKNLWKNI

SEQ ID NO: 35173 - protein, 13 aa, BK virus
LKFCIKNLWKNIL

SEQ ID NO: 35174 - protein, 13 aa, BK virus
LLLVDTCVLGIIL

SEQ ID NO: 35175 - protein, 13 aa, BK virus
LLVDTCVLGIILY

SEQ ID NO: 35176 - protein, 13 aa, BK virus
LVDTCVLGIILYS

SEQ ID NO: 35177 - protein, 13 aa, BK virus
VDTCVLGIILYSF

SEQ ID NO: 35178 - protein, 13 aa, BK virus
LHIDIEFLQLIIS

SEQ ID NO: 35179 - protein, 13 aa, BK virus
HIDIEFLQLIISV

SEQ ID NO: 35180 - protein, 13 aa, BK virus
IDIEFLQLIISVK

SEQ ID NO: 35181 - protein, 13 aa, BK virus
DIEFLQLIISVKS

SEQ ID NO: 35182 - protein, 13 aa, BK virus
IEFLQLIISVKSC

SEQ ID NO: 35183 - protein, 13 aa, BK virus
EFLQLIISVKSCV

SEQ ID NO: 35184 - protein, 13 aa, BK virus
FLQLIISVKSCVP

SEQ ID NO: 35185 - protein, 13 aa, BK virus
LQLIISVKSCVPL

SEQ ID NO: 35186 - protein, 13 aa, BK virus
QLIISVKSCVPLV

SEQ ID NO: 35187 - protein, 13 aa, BK virus
LIISVKSCVPLVF

SEQ ID NO: 35188 - protein, 13 aa, BK virus
FVRVLIRNTYYIV

SEQ ID NO: 35189 - protein, 13 aa, BK virus
VRVLIRNTYYIVP

SEQ ID NO: 35190 - protein, 13 aa, BK virus
RSMILAQKSLKKQ

SEQ ID NO: 35191 - protein, 13 aa, BK virus
SMILAQKSLKKQS

SEQ ID NO: 35192 - protein, 13 aa, BK virus
MILAQKSLKKQSR

SEQ ID NO: 35193 - protein, 13 aa, BK virus
ILAQKSLKKQSRC

SEQ ID NO: 35194 - protein, 13 aa, BK virus
LAQKSLKKQSRCL

SEQ ID NO: 35195 - protein, 13 aa, BK virus
AQKSLKKQSRCLG

SEQ ID NO: 35196 - protein, 13 aa, BK virus
QKSLKKQSRCLGN

SEQ ID NO: 35197 - protein, 13 aa, BK virus
RSVKSVRKKTSLI

SEQ ID NO: 35198 - protein, 13 aa, BK virus
SVKSVRKKTSLIT

SEQ ID NO: 35199 - protein, 13 aa, BK virus
VKSVRKKTSLITL

SEQ ID NO: 35200 - protein, 13 aa, BK virus
KSVRKKTSLITLS

SEQ ID NO: 35201 - protein, 13 aa, BK virus
SVRKKTSLITLSI

SEQ ID NO: 35202 - protein, 13 aa, BK virus
VRKKTSLITLSIM

SEQ ID NO: 35203 - protein, 13 aa, BK virus
RKKTSLITLSIMK

SEQ ID NO: 35204 - protein, 13 aa, BK virus
KKTSLITLSIMKS

SEQ ID NO: 35205 - protein, 13 aa, BK virus
KTSLITLSIMKST

SEQ ID NO: 35206 - protein, 13 aa, BK virus
TSLITLSIMKSTL

SEQ ID NO: 35207 - protein, 13 aa, BK virus
SLITLSIMKSTLQ

SEQ ID NO: 35208 - protein, 13 aa, BK virus
LITLSIMKSTLQM

SEQ ID NO: 35209 - protein, 13 aa, BK virus
ITLSIMKSTLQML

SEQ ID NO: 35210 - protein, 13 aa, BK virus
TLSIMKSTLQMLL

SEQ ID NO: 35211 - protein, 13 aa, BK virus
LSIMKSTLQMLLF

SEQ ID NO: 35212 - protein, 13 aa, BK virus
SIMKSTLQMLLFL

SEQ ID NO: 35213 - protein, 13 aa, BK virus
IMKSTLQMLLFLQ

SEQ ID NO: 35214 - protein, 13 aa, BK virus
MKSTLQMLLFLQK

SEQ ID NO: 35215 - protein, 13 aa, BK virus
KSTLQMLLFLQKV

SEQ ID NO: 35216 - protein, 13 aa, BK virus
STLQMLLFLQKVK

SEQ ID NO: 35217 - protein, 13 aa, BK virus
TLQMLLFLQKVKI

SEQ ID NO: 35218 - protein, 13 aa, BK virus
LQMLLFLQKVKIK

SEQ ID NO: 35219 - protein, 13 aa, BK virus
QMLLFLQKVKIKK

SEQ ID NO: 35220 - protein, 13 aa, BK virus
MLLFLQKVKIKKV

SEQ ID NO: 35221 - protein, 13 aa, BK virus
LLFLQKVKIKKVF

SEQ ID NO: 35222 - protein, 13 aa, BK virus
LFLQKVKIKKVFV

SEQ ID NO: 35223 - protein, 13 aa, BK virus
FLQKVKIKKVFVS

SEQ ID NO: 35224 - protein, 13 aa, BK virus
LQKVKIKKVFVSK

SEQ ID NO: 35225 - protein, 13 aa, BK virus
QKVKIKKVFVSKQ

SEQ ID NO: 35226 - protein, 13 aa, BK virus
NNIWQVLLGCTVC

SEQ ID NO: 35227 - protein, 13 aa, BK virus
NIWQVLLGCTVCY

SEQ ID NO: 35228 - protein, 13 aa, BK virus
IWQVLLGCTVCYL

SEQ ID NO: 35229 - protein, 13 aa, BK virus
WQVLLGCTVCYLK

SEQ ID NO: 35230 - protein, 13 aa, BK virus
QVLLGCTVCYLKW

SEQ ID NO: 35231 - protein, 13 aa, BK virus
VLLGCTVCYLKWI

SEQ ID NO: 35232 - protein, 13 aa, BK virus
LLGCTVCYLKWIL

SEQ ID NO: 35233 - protein, 13 aa, BK virus
YLIFCTVLFSMYL

SEQ ID NO: 35234 - protein, 13 aa, BK virus
LIFCTVLFSMYLK

SEQ ID NO: 35235 - protein, 13 aa, BK virus
IFCTVLFSMYLKE

SEQ ID NO: 35236 - protein, 13 aa, BK virus
FCTVLFSMYLKED

SEQ ID NO: 35237 - protein, 13 aa, BK virus
CTVLFSMYLKEDT

SEQ ID NO: 35238 - protein, 13 aa, BK virus
TVLFSMYLKEDTG

SEQ ID NO: 35239 - protein, 13 aa, BK virus
VLFSMYLKEDTGY

SEQ ID NO: 35240 - protein, 13 aa, BK virus
LFSMYLKEDTGYL

SEQ ID NO: 35241 - protein, 13 aa, BK virus
FSMYLKEDTGYLK

SEQ ID NO: 35242 - protein, 13 aa, BK virus
SMYLKEDTGYLKV

SEQ ID NO: 35243 - protein, 13 aa, BK virus
MYLKEDTGYLKVP

SEQ ID NO: 35244 - protein, 13 aa, BK virus
YLKEDTGYLKVPL

SEQ ID NO: 35245 - protein, 13 aa, BK virus
LKEDTGYLKVPLI

SEQ ID NO: 35246 - protein, 13 aa, BK virus
KEDTGYLKVPLIV

SEQ ID NO: 35247 - protein, 13 aa, BK virus
EDTGYLKVPLIVE

SEQ ID NO: 35248 - protein, 13 aa, BK virus
DTGYLKVPLIVEK

SEQ ID NO: 35249 - protein, 13 aa, BK virus
TGYLKVPLIVEKQ

SEQ ID NO: 35250 - protein, 13 aa, BK virus
GYLKVPLIVEKQH

SEQ ID NO: 35251 - protein, 13 aa, BK virus
KGQELNQRICLQD

SEQ ID NO: 35252 - protein, 13 aa, BK virus
GQELNQRICLQDM

SEQ ID NO: 35253 - protein, 13 aa, BK virus
QELNQRICLQDME

SEQ ID NO: 35254 - protein, 13 aa, BK virus
TKEPKYFHQAWLQ

SEQ ID NO: 35255 - protein, 13 aa, BK virus
MSILSLKPCKLDL

SEQ ID NO: 35256 - protein, 13 aa, BK virus
ENPYKTQSSYLKK

SEQ ID NO: 35257 - protein, 13 aa, BK virus
NPYKTQSSYLKKE

SEQ ID NO: 35258 - protein, 13 aa, BK virus
PYKTQSSYLKKEF

SEQ ID NO: 35259 - protein, 13 aa, BK virus
YKTQSSYLKKEFY

SEQ ID NO: 35260 - protein, 13 aa, BK virus
KTQSSYLKKEFYK

SEQ ID NO: 35261 - protein, 13 aa, BK virus
TQSSYLKKEFYKV

SEQ ID NO: 35262 - protein, 13 aa, BK virus
QSSYLKKEFYKVE

SEQ ID NO: 35263 - protein, 13 aa, BK virus
LILQLIYNLELLN

SEQ ID NO: 35264 - protein, 13 aa, BK virus
ILQLIYNLELLNG

SEQ ID NO: 35265 - protein, 13 aa, BK virus
LQLIYNLELLNGR

SEQ ID NO: 35266 - protein, 13 aa, BK virus
QLIYNLELLNGRK

SEQ ID NO: 35267 - protein, 13 aa, BK virus
LIYNLELLNGRKG

SEQ ID NO: 35268 - protein, 13 aa, BK virus
IYNLELLNGRKGW

SEQ ID NO: 35269 - protein, 13 aa, BK virus
YNLELLNGRKGWI

SEQ ID NO: 35270 - protein, 13 aa, BK virus
NLELLNGRKGWIL

SEQ ID NO: 35271 - protein, 13 aa, BK virus
LELLNGRKGWILR

SEQ ID NO: 35272 - protein, 13 aa, BK virus
NIIYAWGNVFLIL

SEQ ID NO: 35273 - protein, 13 aa, BK virus
IIYAWGNVFLILQ

SEQ ID NO: 35274 - protein, 13 aa, BK virus
IYAWGNVFLILQE

SEQ ID NO: 35275 - protein, 13 aa, BK virus
YAWGNVFLILQEK

SEQ ID NO: 35276 - protein, 13 aa, BK virus
AWGNVFLILQEKR

SEQ ID NO: 35277 - protein, 13 aa, BK virus
WGNVFLILQEKRI

SEQ ID NO: 35278 - protein, 13 aa, BK virus
GNVFLILQEKRIQ

SEQ ID NO: 35279 - protein, 13 aa, BK virus
NVFLILQEKRIQK

SEQ ID NO: 35280 - protein, 13 aa, BK virus
VFLILQEKRIQKL

SEQ ID NO: 35281 - protein, 13 aa, BK virus
FLILQEKRIQKLK

SEQ ID NO: 35282 - protein, 13 aa, BK virus
LILQEKRIQKLKT

SEQ ID NO: 35283 - protein, 13 aa, BK virus
ILQEKRIQKLKTL

SEQ ID NO: 35284 - protein, 13 aa, BK virus
LQEKRIQKLKTLD

SEQ ID NO: 35285 - protein, 13 aa, BK virus
QEKRIQKLKTLDM

SEQ ID NO: 35286 - protein, 13 aa, BK virus
EKRIQKLKTLDMD

SEQ ID NO: 35287 - protein, 13 aa, BK virus
KRIQKLKTLDMDQ

SEQ ID NO: 35288 - protein, 13 aa, BK virus
RIQKLKTLDMDQA

SEQ ID NO: 35289 - protein, 13 aa, BK virus
IQKLKTLDMDQAL

SEQ ID NO: 35290 - protein, 13 aa, BK virus
QKLKTLDMDQALN

SEQ ID NO: 35291 - protein, 13 aa, BK virus
KLKTLDMDQALNP

SEQ ID NO: 35292 - protein, 13 aa, BK virus
LKTLDMDQALNPN

SEQ ID NO: 35293 - protein, 13 aa, BK virus
KTLDMDQALNPNH

SEQ ID NO: 35294 - protein, 13 aa, BK virus
TLDMDQALNPNHN

SEQ ID NO: 35295 - protein, 13 aa, BK virus
LDMDQALNPNHNA

SEQ ID NO: 35296 - protein, 13 aa, BK virus
DMDQALNPNHNAL

SEQ ID NO: 35297 - protein, 13 aa, BK virus
MDQALNPNHNALP

SEQ ID NO: 35298 - protein, 13 aa, BK virus
DQALNPNHNALPK

SEQ ID NO: 35299 - protein, 13 aa, BK virus
QALNPNHNALPKS

SEQ ID NO: 35300 - protein, 13 aa, BK virus
ALNPNHNALPKSQ

SEQ ID NO: 35301 - protein, 13 aa, BK virus
LNPNHNALPKSQI

SEQ ID NO: 35302 - protein, 13 aa, BK virus
NPNHNALPKSQIL

SEQ ID NO: 35303 - protein, 13 aa, BK virus
PNHNALPKSQILQ

SEQ ID NO: 35304 - protein, 13 aa, BK virus
NHNALPKSQILQP

SEQ ID NO: 35305 - protein, 13 aa, BK virus
HNALPKSQILQPL

SEQ ID NO: 35306 - protein, 13 aa, BK virus
NALPKSQILQPLL

SEQ ID NO: 35307 - protein, 13 aa, BK virus
ALPKSQILQPLLK

SEQ ID NO: 35308 - protein, 13 aa, BK virus
LPKSQILQPLLKI

SEQ ID NO: 35309 - protein, 13 aa, BK virus
PKSQILQPLLKIP

SEQ ID NO: 35310 - protein, 13 aa, BK virus
KSQILQPLLKIPK

SEQ ID NO: 35311 - protein, 13 aa, BK virus
SQILQPLLKIPKG

SEQ ID NO: 35312 - protein, 13 aa, BK virus
QILQPLLKIPKGQ

SEQ ID NO: 35313 - protein, 13 aa, BK virus
ILQPLLKIPKGQT

SEQ ID NO: 35314 - protein, 13 aa, BK virus
LQPLLKIPKGQTP

SEQ ID NO: 35315 - protein, 13 aa, BK virus
QPLLKIPKGQTPI

SEQ ID NO: 35316 - protein, 13 aa, BK virus
PLLKIPKGQTPIV

SEQ ID NO: 35317 - protein, 13 aa, BK virus
LLKIPKGQTPIVK

SEQ ID NO: 35318 - protein, 13 aa, BK virus
LKIPKGQTPIVKS

SEQ ID NO: 35319 - protein, 13 aa, BK virus
KIPKGQTPIVKSC

SEQ ID NO: 35320 - protein, 13 aa, BK virus
IPKGQTPIVKSCI

SEQ ID NO: 35321 - protein, 13 aa, BK virus
PKGQTPIVKSCIC

SEQ ID NO: 35322 - protein, 13 aa, BK virus
KGQTPIVKSCICV

SEQ ID NO: 35323 - protein, 13 aa, BK virus
GQTPIVKSCICVK

SEQ ID NO: 35324 - protein, 13 aa, BK virus
QTPIVKSCICVKA

SEQ ID NO: 35325 - protein, 13 aa, BK virus
TPIVKSCICVKAF

SEQ ID NO: 35326 - protein, 13 aa, BK virus
PIVKSCICVKAFS

SEQ ID NO: 35327 - protein, 13 aa, BK virus
IVKSCICVKAFSV

SEQ ID NO: 35328 - protein, 13 aa, BK virus
VKSCICVKAFSVL

SEQ ID NO: 35329 - protein, 13 aa, BK virus
KSCICVKAFSVLK

SEQ ID NO: 35330 - protein, 13 aa, BK virus
SCICVKAFSVLKG

SEQ ID NO: 35331 - protein, 13 aa, BK virus
CICVKAFSVLKGL

SEQ ID NO: 35332 - protein, 13 aa, BK virus
ICVKAFSVLKGLK

SEQ ID NO: 35333 - protein, 13 aa, BK virus
CVKAFSVLKGLKH

SEQ ID NO: 35334 - protein, 13 aa, BK virus
VKAFSVLKGLKHH

SEQ ID NO: 35335 - protein, 13 aa, BK virus
KAFSVLKGLKHHP

SEQ ID NO: 35336 - protein, 13 aa, BK virus
AFSVLKGLKHHPQ

SEQ ID NO: 35337 - protein, 13 aa, BK virus
FSVLKGLKHHPQN

SEQ ID NO: 35338 - protein, 13 aa, BK virus
SVLKGLKHHPQNN

SEQ ID NO: 35339 - protein, 13 aa, BK virus
VLKGLKHHPQNNT

SEQ ID NO: 35340 - protein, 13 aa, BK virus
LKGLKHHPQNNTS

SEQ ID NO: 35341 - protein, 13 aa, BK virus
KGLKHHPQNNTSL

SEQ ID NO: 35342 - protein, 13 aa, BK virus
GLKHHPQNNTSLK

SEQ ID NO: 35343 - protein, 13 aa, BK virus
LKHHPQNNTSLKV

SEQ ID NO: 35344 - protein, 13 aa, BK virus
KHHPQNNTSLKVA

SEQ ID NO: 35345 - protein, 13 aa, BK virus
HHPQNNTSLKVAY

SEQ ID NO: 35346 - protein, 13 aa, BK virus
HPQNNTSLKVAYT

SEQ ID NO: 35347 - protein, 13 aa, BK virus
PQNNTSLKVAYTK

SEQ ID NO: 35348 - protein, 13 aa, BK virus
QNNTSLKVAYTKA

SEQ ID NO: 35349 - protein, 13 aa, BK virus
NNTSLKVAYTKAA

SEQ ID NO: 35350 - protein, 13 aa, BK virus
NTSLKVAYTKAAF

SEQ ID NO: 35351 - protein, 13 aa, BK virus
TSLKVAYTKAAFI

SEQ ID NO: 35352 - protein, 13 aa, BK virus
SLKVAYTKAAFIK

SEQ ID NO: 35353 - protein, 13 aa, BK virus
LKVAYTKAAFIKC

SEQ ID NO: 35354 - protein, 13 aa, BK virus
KVAYTKAAFIKCI

SEQ ID NO: 35355 - protein, 13 aa, BK virus
VAYTKAAFIKCIC

SEQ ID NO: 35356 - protein, 13 aa, BK virus
AYTKAAFIKCICT

SEQ ID NO: 35357 - protein, 13 aa, BK virus
YTKAAFIKCICTI

SEQ ID NO: 35358 - protein, 13 aa, BK virus
TKAAFIKCICTIK

SEQ ID NO: 35359 - protein, 13 aa, BK virus
KAAFIKCICTIKA

SEQ ID NO: 35360 - protein, 13 aa, BK virus
AAFIKCICTIKAP

SEQ ID NO: 35361 - protein, 13 aa, BK virus
AFIKCICTIKAPV

SEQ ID NO: 35362 - protein, 13 aa, BK virus
SILVCNCPCLSIY

SEQ ID NO: 35363 - protein, 13 aa, BK virus
ILVCNCPCLSIYL

SEQ ID NO: 35364 - protein, 13 aa, BK virus
LVCNCPCLSIYLI

SEQ ID NO: 35365 - protein, 13 aa, BK virus
VCNCPCLSIYLII

SEQ ID NO: 35366 - protein, 13 aa, BK virus
CNCPCLSIYLIIS

SEQ ID NO: 35367 - protein, 13 aa, BK virus
NCPCLSIYLIISG

SEQ ID NO: 35368 - protein, 13 aa, BK virus
CPCLSIYLIISGS

SEQ ID NO: 35369 - protein, 13 aa, BK virus
PCLSIYLIISGSP

SEQ ID NO: 35370 - protein, 13 aa, BK virus
CLSIYLIISGSPG

SEQ ID NO: 35371 - protein, 13 aa, BK virus
LSIYLIISGSPGS

SEQ ID NO: 35372 - protein, 13 aa, BK virus
SIYLIISGSPGSL

SEQ ID NO: 35373 - protein, 13 aa, BK virus
IYLIISGSPGSLS

SEQ ID NO: 35374 - protein, 13 aa, BK virus
YLIISGSPGSLSV

SEQ ID NO: 35375 - protein, 13 aa, BK virus
LIISGSPGSLSVP

SEQ ID NO: 35376 - protein, 13 aa, BK virus
IISGSPGSLSVPS

SEQ ID NO: 35377 - protein, 13 aa, BK virus
ISGSPGSLSVPSN

SEQ ID NO: 35378 - protein, 13 aa, BK virus
SGSPGSLSVPSNT

SEQ ID NO: 35379 - protein, 13 aa, BK virus
GSPGSLSVPSNTL

SEQ ID NO: 35380 - protein, 13 aa, BK virus
SPGSLSVPSNTLT

SEQ ID NO: 35381 - protein, 13 aa, BK virus
PGSLSVPSNTLTS

SEQ ID NO: 35382 - protein, 13 aa, BK virus
GSLSVPSNTLTSS

SEQ ID NO: 35383 - protein, 13 aa, BK virus
SLSVPSNTLTSST

SEQ ID NO: 35384 - protein, 13 aa, BK virus
LSVPSNTLTSSTW

SEQ ID NO: 35385 - protein, 13 aa, BK virus
SVPSNTLTSSTWD

SEQ ID NO: 35386 - protein, 13 aa, BK virus
VPSNTLTSSTWDS

SEQ ID NO: 35387 - protein, 13 aa, BK virus
PSNTLTSSTWDSI

SEQ ID NO: 35388 - protein, 13 aa, BK virus
SNTLTSSTWDSIP

SEQ ID NO: 35389 - protein, 13 aa, BK virus
NTLTSSTWDSIPY

SEQ ID NO: 35390 - protein, 13 aa, BK virus
TLTSSTWDSIPYI

SEQ ID NO: 35391 - protein, 13 aa, BK virus
LTSSTWDSIPYIG

SEQ ID NO: 35392 - protein, 13 aa, BK virus
TSSTWDSIPYIGC

SEQ ID NO: 35393 - protein, 13 aa, BK virus
SSTWDSIPYIGCP

SEQ ID NO: 35394 - protein, 13 aa, BK virus
STWDSIPYIGCPS

SEQ ID NO: 35395 - protein, 13 aa, BK virus
TWDSIPYIGCPST

SEQ ID NO: 35396 - protein, 13 aa, BK virus
WDSIPYIGCPSTL

SEQ ID NO: 35397 - protein, 13 aa, BK virus
DSIPYIGCPSTLW

SEQ ID NO: 35398 - protein, 13 aa, BK virus
SIPYIGCPSTLWV

SEQ ID NO: 35399 - protein, 13 aa, BK virus
IPYIGCPSTLWVL

SEQ ID NO: 35400 - protein, 13 aa, BK virus
PYIGCPSTLWVLL

SEQ ID NO: 35401 - protein, 13 aa, BK virus
YIGCPSTLWVLLF

SEQ ID NO: 35402 - protein, 13 aa, BK virus
IGCPSTLWVLLFI

SEQ ID NO: 35403 - protein, 13 aa, BK virus
GCPSTLWVLLFIR

SEQ ID NO: 35404 - protein, 13 aa, BK virus
CPSTLWVLLFIRS

SEQ ID NO: 35405 - protein, 13 aa, BK virus
PSTLWVLLFIRSL

SEQ ID NO: 35406 - protein, 13 aa, BK virus
STLWVLLFIRSLS

SEQ ID NO: 35407 - protein, 13 aa, BK virus
TLWVLLFIRSLSK

SEQ ID NO: 35408 - protein, 13 aa, BK virus
LWVLLFIRSLSKK

SEQ ID NO: 35409 - protein, 13 aa, BK virus
WVLLFIRSLSKKE

SEQ ID NO: 35410 - protein, 13 aa, BK virus
VLLFIRSLSKKEI

SEQ ID NO: 35411 - protein, 13 aa, BK virus
LLFIRSLSKKEIG

SEQ ID NO: 35412 - protein, 13 aa, BK virus
GFFTDLFLRRILK

SEQ ID NO: 35413 - protein, 13 aa, BK virus
FFTDLFLRRILKY

SEQ ID NO: 35414 - protein, 13 aa, BK virus
FTDLFLRRILKYL

SEQ ID NO: 35415 - protein, 13 aa, BK virus
TDLFLRRILKYLA

SEQ ID NO: 35416 - protein, 13 aa, BK virus
DLFLRRILKYLAR

SEQ ID NO: 35417 - protein, 13 aa, BK virus
LFLRRILKYLARP

SEQ ID NO: 35418 - protein, 13 aa, BK virus
FLRRILKYLARPL

SEQ ID NO: 35419 - protein, 13 aa, BK virus
LRRILKYLARPLH

SEQ ID NO: 35420 - protein, 13 aa, BK virus
RRILKYLARPLHC

SEQ ID NO: 35421 - protein, 13 aa, BK virus
RILKYLARPLHCC

SEQ ID NO: 35422 - protein, 13 aa, BK virus
ILKYLARPLHCCV

SEQ ID NO: 35423 - protein, 13 aa, BK virus
LKYLARPLHCCVP

SEQ ID NO: 35424 - protein, 13 aa, BK virus
KYLARPLHCCVPE

SEQ ID NO: 35425 - protein, 13 aa, BK virus
YLARPLHCCVPEL

SEQ ID NO: 35426 - protein, 13 aa, BK virus
LARPLHCCVPELL

SEQ ID NO: 35427 - protein, 13 aa, BK virus
ARPLHCCVPELLV

SEQ ID NO: 35428 - protein, 13 aa, BK virus
RPLHCCVPELLVN

SEQ ID NO: 35429 - protein, 13 aa, BK virus
PLHCCVPELLVNR

SEQ ID NO: 35430 - protein, 13 aa, BK virus
LHCCVPELLVNRP

SEQ ID NO: 35431 - protein, 13 aa, BK virus
HCCVPELLVNRPQ

SEQ ID NO: 35432 - protein, 13 aa, BK virus
CCVPELLVNRPQI

SEQ ID NO: 35433 - protein, 13 aa, BK virus
CVPELLVNRPQIS

SEQ ID NO: 35434 - protein, 13 aa, BK virus
VPELLVNRPQISA

SEQ ID NO: 35435 - protein, 13 aa, BK virus
PELLVNRPQISAA

SEQ ID NO: 35436 - protein, 13 aa, BK virus
ELLVNRPQISAAE

SEQ ID NO: 35437 - protein, 13 aa, BK virus
LLVNRPQISAAET

SEQ ID NO: 35438 - protein, 13 aa, BK virus
LVNRPQISAAETY

SEQ ID NO: 35439 - protein, 13 aa, BK virus
VNRPQISAAETYR

SEQ ID NO: 35440 - protein, 13 aa, BK virus
NRPQISAAETYRL

SEQ ID NO: 35441 - protein, 13 aa, BK virus
RPQISAAETYRLS

SEQ ID NO: 35442 - protein, 13 aa, BK virus
PQISAAETYRLSA

SEQ ID NO: 35443 - protein, 13 aa, BK virus
QISAAETYRLSAL

SEQ ID NO: 35444 - protein, 13 aa, BK virus
ISAAETYRLSALQ

SEQ ID NO: 35445 - protein, 13 aa, BK virus
SAAETYRLSALQR

SEQ ID NO: 35446 - protein, 13 aa, BK virus
AAETYRLSALQRG

SEQ ID NO: 35447 - protein, 13 aa, BK virus
AETYRLSALQRGP

SEQ ID NO: 35448 - protein, 13 aa, BK virus
ETYRLSALQRGPT

SEQ ID NO: 35449 - protein, 13 aa, BK virus
TYRLSALQRGPTP

SEQ ID NO: 35450 - protein, 13 aa, BK virus
YRLSALQRGPTPC

SEQ ID NO: 35451 - protein, 13 aa, BK virus
RLSALQRGPTPCS

SEQ ID NO: 35452 - protein, 13 aa, BK virus
LSALQRGPTPCSS

SEQ ID NO: 35453 - protein, 13 aa, BK virus
SALQRGPTPCSSS

SEQ ID NO: 35454 - protein, 13 aa, BK virus
ALQRGPTPCSSSN

SEQ ID NO: 35455 - protein, 13 aa, BK virus
LQRGPTPCSSSNT

SEQ ID NO: 35456 - protein, 13 aa, BK virus
QRGPTPCSSSNTV

SEQ ID NO: 35457 - protein, 13 aa, BK virus
RGPTPCSSSNTVV

SEQ ID NO: 35458 - protein, 13 aa, BK virus
GPTPCSSSNTVVA

SEQ ID NO: 35459 - protein, 13 aa, BK virus
PTPCSSSNTVVAV

SEQ ID NO: 35460 - protein, 13 aa, BK virus
TPCSSSNTVVAVL

SEQ ID NO: 35461 - protein, 13 aa, BK virus
PCSSSNTVVAVLV

SEQ ID NO: 35462 - protein, 13 aa, BK virus
CSSSNTVVAVLVT

SEQ ID NO: 35463 - protein, 13 aa, BK virus
STGGTFSPPVKVP

SEQ ID NO: 35464 - protein, 13 aa, BK virus
TGGTFSPPVKVPK

SEQ ID NO: 35465 - protein, 13 aa, BK virus
GGTFSPPVKVPKY

SEQ ID NO: 35466 - protein, 13 aa, BK virus
GTFSPPVKVPKYL

SEQ ID NO: 35467 - protein, 13 aa, BK virus
TFSPPVKVPKYLA

SEQ ID NO: 35468 - protein, 13 aa, BK virus
FSPPVKVPKYLAF

SEQ ID NO: 35469 - protein, 13 aa, BK virus
SPPVKVPKYLAFS

SEQ ID NO: 35470 - protein, 13 aa, BK virus
PPVKVPKYLAFSF

SEQ ID NO: 35471 - protein, 13 aa, BK virus
PVKVPKYLAFSFL

SEQ ID NO: 35472 - protein, 13 aa, BK virus
VKVPKYLAFSFLL

SEQ ID NO: 35473 - protein, 13 aa, BK virus
KVPKYLAFSFLLG

SEQ ID NO: 35474 - protein, 13 aa, BK virus
VPKYLAFSFLLGS

SEQ ID NO: 35475 - protein, 13 aa, BK virus
PKYLAFSFLLGSG

SEQ ID NO: 35476 - protein, 13 aa, BK virus
KYLAFSFLLGSGT

SEQ ID NO: 35477 - protein, 13 aa, BK virus
YLAFSFLLGSGTQ

SEQ ID NO: 35478 - protein, 13 aa, BK virus
LAFSFLLGSGTQH

SEQ ID NO: 35479 - protein, 13 aa, BK virus
AFSFLLGSGTQHS

SEQ ID NO: 35480 - protein, 13 aa, BK virus
FSFLLGSGTQHST

SEQ ID NO: 35481 - protein, 13 aa, BK virus
SFLLGSGTQHSTG

SEQ ID NO: 35482 - protein, 13 aa, BK virus
ALWSVFITWDWAV

SEQ ID NO: 35483 - protein, 13 aa, BK virus
LWSVFITWDWAVG

SEQ ID NO: 35484 - protein, 13 aa, BK virus
WSVFITWDWAVGF

SEQ ID NO: 35485 - protein, 13 aa, BK virus
SVFITWDWAVGFL

SEQ ID NO: 35486 - protein, 13 aa, BK virus
VFITWDWAVGFLG

SEQ ID NO: 35487 - protein, 13 aa, BK virus
FITWDWAVGFLGV

SEQ ID NO: 35488 - protein, 13 aa, BK virus
ITWDWAVGFLGVI

SEQ ID NO: 35489 - protein, 13 aa, BK virus
TWDWAVGFLGVIV

SEQ ID NO: 35490 - protein, 13 aa, BK virus
WDWAVGFLGVIVP

SEQ ID NO: 35491 - protein, 13 aa, BK virus
DWAVGFLGVIVPS

SEQ ID NO: 35492 - protein, 13 aa, BK virus
WAVGFLGVIVPSG

SEQ ID NO: 35493 - protein, 13 aa, BK virus
AVGFLGVIVPSGY

SEQ ID NO: 35494 - protein, 13 aa, BK virus
VGFLGVIVPSGYF

SEQ ID NO: 35495 - protein, 13 aa, BK virus
GFLGVIVPSGYFD

SEQ ID NO: 35496 - protein, 13 aa, BK virus
FLGVIVPSGYFDL

SEQ ID NO: 35497 - protein, 13 aa, BK virus
FISTPCISKGSPP

SEQ ID NO: 35498 - protein, 13 aa, BK virus
ISTPCISKGSPPT

SEQ ID NO: 35499 - protein, 13 aa, BK virus
STPCISKGSPPTA

SEQ ID NO: 35500 - protein, 13 aa, BK virus
TPCISKGSPPTAK

SEQ ID NO: 35501 - protein, 13 aa, BK virus
PCISKGSPPTAKK

SEQ ID NO: 35502 - protein, 13 aa, BK virus
CISKGSPPTAKKW

SEQ ID NO: 35503 - protein, 13 aa, BK virus
ISKGSPPTAKKWK

SEQ ID NO: 35504 - protein, 13 aa, BK virus
SKGSPPTAKKWKL

SEQ ID NO: 35505 - protein, 13 aa, BK virus
KGSPPTAKKWKLL

SEQ ID NO: 35506 - protein, 13 aa, BK virus
GSPPTAKKWKLLP

SEQ ID NO: 35507 - protein, 13 aa, BK virus
IGFPPPCSCTFCD

SEQ ID NO: 35508 - protein, 13 aa, BK virus
GFPPPCSCTFCDP

SEQ ID NO: 35509 - protein, 13 aa, BK virus
FPPPCSCTFCDPA

SEQ ID NO: 35510 - protein, 13 aa, BK virus
RLSMLVIPITSVC

SEQ ID NO: 35511 - protein, 13 aa, BK virus
LSMLVIPITSVCT

SEQ ID NO: 35512 - protein, 13 aa, BK virus
SMLVIPITSVCTV

SEQ ID NO: 35513 - protein, 13 aa, BK virus
MLVIPITSVCTVT

SEQ ID NO: 35514 - protein, 13 aa, BK virus
LVIPITSVCTVTA

SEQ ID NO: 35515 - protein, 13 aa, BK virus
VIPITSVCTVTAS

SEQ ID NO: 35516 - protein, 13 aa, BK virus
IPITSVCTVTASH

SEQ ID NO: 35517 - protein, 13 aa, BK virus
PITSVCTVTASHI

SEQ ID NO: 35518 - protein, 13 aa, BK virus
ITSVCTVTASHIS

SEQ ID NO: 35519 - protein, 13 aa, BK virus
TSVCTVTASHISR

SEQ ID NO: 35520 - protein, 13 aa, BK virus
SVCTVTASHISRF

SEQ ID NO: 35521 - protein, 13 aa, BK virus
VCTVTASHISRFP

SEQ ID NO: 35522 - protein, 13 aa, BK virus
CTVTASHISRFPQ

SEQ ID NO: 35523 - protein, 13 aa, BK virus
TVTASHISRFPQV

SEQ ID NO: 35524 - protein, 13 aa, BK virus
VTASHISRFPQVR

SEQ ID NO: 35525 - protein, 13 aa, BK virus
TASHISRFPQVRS

SEQ ID NO: 35526 - protein, 13 aa, BK virus
ASHISRFPQVRSS

SEQ ID NO: 35527 - protein, 13 aa, BK virus
SHISRFPQVRSSF

SEQ ID NO: 35528 - protein, 13 aa, BK virus
HISRFPQVRSSFK

SEQ ID NO: 35529 - protein, 13 aa, BK virus
ISRFPQVRSSFKL

SEQ ID NO: 35530 - protein, 13 aa, BK virus
SRFPQVRSSFKLG

SEQ ID NO: 35531 - protein, 13 aa, BK virus
RFPQVRSSFKLGR

SEQ ID NO: 35532 - protein, 13 aa, BK virus
FPQVRSSFKLGRG

SEQ ID NO: 35533 - protein, 13 aa, BK virus
PQVRSSFKLGRGI

SEQ ID NO: 35534 - protein, 13 aa, BK virus
QVRSSFKLGRGIL

SEQ ID NO: 35535 - protein, 13 aa, BK virus
VRSSFKLGRGILA

SEQ ID NO: 35536 - protein, 13 aa, BK virus
RSSFKLGRGILAV

SEQ ID NO: 35537 - protein, 13 aa, BK virus
SSFKLGRGILAVL

SEQ ID NO: 35538 - protein, 13 aa, BK virus
QGSIFLSGLSLLK

SEQ ID NO: 35539 - protein, 13 aa, BK virus
GSIFLSGLSLLKS

SEQ ID NO: 35540 - protein, 13 aa, BK virus
SIFLSGLSLLKSF

SEQ ID NO: 35541 - protein, 13 aa, BK virus
IFLSGLSLLKSFS

SEQ ID NO: 35542 - protein, 13 aa, BK virus
FLSGLSLLKSFSA

SEQ ID NO: 35543 - protein, 13 aa, BK virus
LSGLSLLKSFSAL

SEQ ID NO: 35544 - protein, 13 aa, BK virus
SGLSLLKSFSALS

SEQ ID NO: 35545 - protein, 13 aa, BK virus
GLSLLKSFSALSF

SEQ ID NO: 35546 - protein, 13 aa, BK virus
LSLLKSFSALSFR

SEQ ID NO: 35547 - protein, 13 aa, BK virus
SLLKSFSALSFRL

SEQ ID NO: 35548 - protein, 13 aa, BK virus
LLKSFSALSFRLK

SEQ ID NO: 35549 - protein, 13 aa, BK virus
LKSFSALSFRLKP

SEQ ID NO: 35550 - protein, 13 aa, BK virus
KSFSALSFRLKPL

SEQ ID NO: 35551 - protein, 13 aa, BK virus
SFSALSFRLKPLR

SEQ ID NO: 35552 - protein, 13 aa, BK virus
FSALSFRLKPLRF

SEQ ID NO: 35553 - protein, 13 aa, BK virus
SALSFRLKPLRFS

SEQ ID NO: 35554 - protein, 13 aa, BK virus
ALSFRLKPLRFSS

SEQ ID NO: 35555 - protein, 13 aa, BK virus
LSFRLKPLRFSSG

SEQ ID NO: 35556 - protein, 13 aa, BK virus
SFRLKPLRFSSGS

SEQ ID NO: 35557 - protein, 13 aa, BK virus
FRLKPLRFSSGSP

SEQ ID NO: 35558 - protein, 13 aa, BK virus
RLKPLRFSSGSPI

SEQ ID NO: 35559 - protein, 13 aa, BK virus
LKPLRFSSGSPIS

SEQ ID NO: 35560 - protein, 13 aa, BK virus
KPLRFSSGSPISG

SEQ ID NO: 35561 - protein, 13 aa, BK virus
PLRFSSGSPISGF

SEQ ID NO: 35562 - protein, 13 aa, BK virus
LRFSSGSPISGFR

SEQ ID NO: 35563 - protein, 13 aa, BK virus
RFSSGSPISGFRK

SEQ ID NO: 35564 - protein, 13 aa, BK virus
FSSGSPISGFRKH

SEQ ID NO: 35565 - protein, 13 aa, BK virus
SSGSPISGFRKHS

SEQ ID NO: 35566 - protein, 13 aa, BK virus
SGSPISGFRKHST

SEQ ID NO: 35567 - protein, 13 aa, BK virus
GSPISGFRKHSTS

SEQ ID NO: 35568 - protein, 13 aa, BK virus
SPISGFRKHSTSV

SEQ ID NO: 35569 - protein, 13 aa, BK virus
PISGFRKHSTSVI

SEQ ID NO: 35570 - protein, 13 aa, BK virus
ISGFRKHSTSVIA

SEQ ID NO: 35571 - protein, 13 aa, BK virus
SGFRKHSTSVIAS

SEQ ID NO: 35572 - protein, 13 aa, BK virus
GFRKHSTSVIAST

SEQ ID NO: 35573 - protein, 13 aa, BK virus
FRKHSTSVIASTP

SEQ ID NO: 35574 - protein, 13 aa, BK virus
RKHSTSVIASTPV

SEQ ID NO: 35575 - protein, 13 aa, BK virus
KHSTSVIASTPVL

SEQ ID NO: 35576 - protein, 13 aa, BK virus
HSTSVIASTPVLT

SEQ ID NO: 35577 - protein, 13 aa, BK virus
STSVIASTPVLTS

SEQ ID NO: 35578 - protein, 13 aa, BK virus
TSVIASTPVLTSR

SEQ ID NO: 35579 - protein, 13 aa, BK virus
SVIASTPVLTSRT

SEQ ID NO: 35580 - protein, 13 aa, BK virus
VIASTPVLTSRTS

SEQ ID NO: 35581 - protein, 13 aa, BK virus
IASTPVLTSRTST

SEQ ID NO: 35582 - protein, 13 aa, BK virus
ASTPVLTSRTSTP

SEQ ID NO: 35583 - protein, 13 aa, BK virus
STPVLTSRTSTPP

SEQ ID NO: 35584 - protein, 13 aa, BK virus
TPVLTSRTSTPPF

SEQ ID NO: 35585 - protein, 13 aa, BK virus
PVLTSRTSTPPFI

SEQ ID NO: 35586 - protein, 13 aa, BK virus
VLTSRTSTPPFIS

SEQ ID NO: 35587 - protein, 13 aa, BK virus
LTSRTSTPPFISS

SEQ ID NO: 35588 - protein, 13 aa, BK virus
TSRTSTPPFISSF

SEQ ID NO: 35589 - protein, 13 aa, BK virus
SRTSTPPFISSFG

SEQ ID NO: 35590 - protein, 13 aa, BK virus
RTSTPPFISSFGT

SEQ ID NO: 35591 - protein, 13 aa, BK virus
TSTPPFISSFGTC

SEQ ID NO: 35592 - protein, 13 aa, BK virus
STPPFISSFGTCT

SEQ ID NO: 35593 - protein, 13 aa, BK virus
TPPFISSFGTCTG

SEQ ID NO: 35594 - protein, 13 aa, BK virus
PPFISSFGTCTGS

SEQ ID NO: 35595 - protein, 13 aa, BK virus
PFISSFGTCTGSF

SEQ ID NO: 35596 - protein, 13 aa, BK virus
FISSFGTCTGSFG

SEQ ID NO: 35597 - protein, 13 aa, BK virus
ISSFGTCTGSFGF

SEQ ID NO: 35598 - protein, 13 aa, BK virus
SSFGTCTGSFGFL

SEQ ID NO: 35599 - protein, 13 aa, BK virus
SFGTCTGSFGFLG

SEQ ID NO: 35600 - protein, 13 aa, BK virus
FGTCTGSFGFLGA

SEQ ID NO: 35601 - protein, 13 aa, BK virus
GTCTGSFGFLGAA

SEQ ID NO: 35602 - protein, 13 aa, BK virus
TCTGSFGFLGAAP

SEQ ID NO: 35603 - protein, 13 aa, BK virus
CTGSFGFLGAAPG

SEQ ID NO: 35604 - protein, 13 aa, BK virus
TGSFGFLGAAPGH

SEQ ID NO: 35605 - protein, 13 aa, BK virus
GSFGFLGAAPGHS

SEQ ID NO: 35606 - protein, 13 aa, BK virus
SFGFLGAAPGHSP

SEQ ID NO: 35607 - protein, 13 aa, BK virus
FGFLGAAPGHSPF

SEQ ID NO: 35608 - protein, 13 aa, BK virus
GFLGAAPGHSPFL

SEQ ID NO: 35609 - protein, 13 aa, BK virus
FLGAAPGHSPFLL

SEQ ID NO: 35610 - protein, 13 aa, BK virus
LGAAPGHSPFLLV

SEQ ID NO: 35611 - protein, 13 aa, BK virus
GAAPGHSPFLLVG

SEQ ID NO: 35612 - protein, 13 aa, BK virus
AAPGHSPFLLVGA

SEQ ID NO: 35613 - protein, 13 aa, BK virus
APGHSPFLLVGAI

SEQ ID NO: 35614 - protein, 13 aa, BK virus
PGHSPFLLVGAIF

SEQ ID NO: 35615 - protein, 13 aa, BK virus
GHSPFLLVGAIFI

SEQ ID NO: 35616 - protein, 13 aa, BK virus
HSPFLLVGAIFIC

SEQ ID NO: 35617 - protein, 13 aa, BK virus
SPFLLVGAIFICF

SEQ ID NO: 35618 - protein, 13 aa, BK virus
PFLLVGAIFICFK

SEQ ID NO: 35619 - protein, 13 aa, BK virus
FLLVGAIFICFKS

SEQ ID NO: 35620 - protein, 13 aa, BK virus
LLVGAIFICFKSR

SEQ ID NO: 35621 - protein, 13 aa, BK virus
LVGAIFICFKSRC

SEQ ID NO: 35622 - protein, 13 aa, BK virus
VGAIFICFKSRCY

SEQ ID NO: 35623 - protein, 13 aa, BK virus
GAIFICFKSRCYS

SEQ ID NO: 35624 - protein, 13 aa, BK virus
AIFICFKSRCYSP

SEQ ID NO: 35625 - protein, 13 aa, BK virus
IFICFKSRCYSPV

SEQ ID NO: 35626 - protein, 13 aa, BK virus
FICFKSRCYSPVQ

SEQ ID NO: 35627 - protein, 13 aa, BK virus
ICFKSRCYSPVQA

SEQ ID NO: 35628 - protein, 13 aa, BK virus
RQHPLRSSSLIST

SEQ ID NO: 35629 - protein, 13 aa, BK virus
QHPLRSSSLISTS

SEQ ID NO: 35630 - protein, 13 aa, BK virus
HPLRSSSLISTSW

SEQ ID NO: 35631 - protein, 13 aa, BK virus
PLRSSSLISTSWG

SEQ ID NO: 35632 - protein, 13 aa, BK virus
LRSSSLISTSWGN

SEQ ID NO: 35633 - protein, 13 aa, BK virus
RSSSLISTSWGNS

SEQ ID NO: 35634 - protein, 13 aa, BK virus
SSSLISTSWGNSF

SEQ ID NO: 35635 - protein, 13 aa, BK virus
SSLISTSWGNSFF

SEQ ID NO: 35636 - protein, 13 aa, BK virus
SLISTSWGNSFFY

SEQ ID NO: 35637 - protein, 13 aa, BK virus
LISTSWGNSFFYK

SEQ ID NO: 35638 - protein, 13 aa, BK virus
ISTSWGNSFFYKL

SEQ ID NO: 35639 - protein, 13 aa, BK virus
STSWGNSFFYKLS

SEQ ID NO: 35640 - protein, 13 aa, BK virus
VHSLCNFFYTVSI

SEQ ID NO: 35641 - protein, 13 aa, BK virus
HSLCNFFYTVSII

SEQ ID NO: 35642 - protein, 13 aa, BK virus
SLCNFFYTVSIIY

SEQ ID NO: 35643 - protein, 13 aa, BK virus
LCNFFYTVSIIYT

SEQ ID NO: 35644 - protein, 13 aa, BK virus
CNFFYTVSIIYTI

SEQ ID NO: 35645 - protein, 13 aa, BK virus
NFFYTVSIIYTIS

SEQ ID NO: 35646 - protein, 13 aa, BK virus
FFYTVSIIYTISM

SEQ ID NO: 35647 - protein, 13 aa, BK virus
FYTVSIIYTISMA

SEQ ID NO: 35648 - protein, 13 aa, BK virus
YTVSIIYTISMAK

SEQ ID NO: 35649 - protein, 13 aa, BK virus
TVSIIYTISMAKM

SEQ ID NO: 35650 - protein, 13 aa, BK virus
VSIIYTISMAKMY

SEQ ID NO: 35651 - protein, 13 aa, BK virus
SIIYTISMAKMYT

SEQ ID NO: 35652 - protein, 13 aa, BK virus
IIYTISMAKMYTG

SEQ ID NO: 35653 - protein, 13 aa, BK virus
IYTISMAKMYTGT

SEQ ID NO: 35654 - protein, 13 aa, BK virus
YTISMAKMYTGTF

SEQ ID NO: 35655 - protein, 13 aa, BK virus
TISMAKMYTGTFP

SEQ ID NO: 35656 - protein, 13 aa, BK virus
ISMAKMYTGTFPF

SEQ ID NO: 35657 - protein, 13 aa, BK virus
SMAKMYTGTFPFS

SEQ ID NO: 35658 - protein, 13 aa, BK virus
MAKMYTGTFPFSY

SEQ ID NO: 35659 - protein, 13 aa, BK virus
AKMYTGTFPFSYL

SEQ ID NO: 35660 - protein, 13 aa, BK virus
KMYTGTFPFSYLS

SEQ ID NO: 35661 - protein, 13 aa, BK virus
MYTGTFPFSYLSN

SEQ ID NO: 35662 - protein, 13 aa, BK virus
YTGTFPFSYLSNH

SEQ ID NO: 35663 - protein, 13 aa, BK virus
GPNRGKIRIILLN

SEQ ID NO: 35664 - protein, 13 aa, BK virus
PNRGKIRIILLNI

SEQ ID NO: 35665 - protein, 13 aa, BK virus
NRGKIRIILLNII

SEQ ID NO: 35666 - protein, 13 aa, BK virus
RGKIRIILLNIII

SEQ ID NO: 35667 - protein, 13 aa, BK virus
GKIRIILLNIIIK

SEQ ID NO: 35668 - protein, 13 aa, BK virus
KIRIILLNIIIKV

SEQ ID NO: 35669 - protein, 13 aa, BK virus
IRIILLNIIIKVY

SEQ ID NO: 35670 - protein, 13 aa, BK virus
RIILLNIIIKVYR

SEQ ID NO: 35671 - protein, 13 aa, BK virus
IILLNIIIKVYRG

SEQ ID NO: 35672 - protein, 13 aa, BK virus
ILLNIIIKVYRGI

SEQ ID NO: 35673 - protein, 13 aa, BK virus
LLNIIIKVYRGIY

SEQ ID NO: 35674 - protein, 13 aa, BK virus
LNIIIKVYRGIYN

SEQ ID NO: 35675 - protein, 13 aa, BK virus
NIIIKVYRGIYNC

SEQ ID NO: 35676 - protein, 13 aa, BK virus
IIIKVYRGIYNCP

SEQ ID NO: 35677 - protein, 13 aa, BK virus
IIKVYRGIYNCPG

SEQ ID NO: 35678 - protein, 13 aa, BK virus
IKVYRGIYNCPGS

SEQ ID NO: 35679 - protein, 13 aa, BK virus
KVYRGIYNCPGSF

SEQ ID NO: 35680 - protein, 13 aa, BK virus
VYRGIYNCPGSFL

SEQ ID NO: 35681 - protein, 13 aa, BK virus
YRGIYNCPGSFLQ

SEQ ID NO: 35682 - protein, 13 aa, BK virus
RGIYNCPGSFLQK

SEQ ID NO: 35683 - protein, 13 aa, BK virus
GIYNCPGSFLQKS

SEQ ID NO: 35684 - protein, 13 aa, BK virus
IYNCPGSFLQKSS

SEQ ID NO: 35685 - protein, 13 aa, BK virus
YNCPGSFLQKSSQ

SEQ ID NO: 35686 - protein, 13 aa, BK virus
NCPGSFLQKSSQG

SEQ ID NO: 35687 - protein, 13 aa, BK virus
CPGSFLQKSSQGV

SEQ ID NO: 35688 - protein, 13 aa, BK virus
PGSFLQKSSQGVS

SEQ ID NO: 35689 - protein, 13 aa, BK virus
GSFLQKSSQGVSK

SEQ ID NO: 35690 - protein, 13 aa, BK virus
SFLQKSSQGVSKK

SEQ ID NO: 35691 - protein, 13 aa, BK virus
FLQKSSQGVSKKS

SEQ ID NO: 35692 - protein, 13 aa, BK virus
LQKSSQGVSKKSF

SEQ ID NO: 35693 - protein, 13 aa, BK virus
QKSSQGVSKKSFC

SEQ ID NO: 35694 - protein, 13 aa, BK virus
KSSQGVSKKSFCS

SEQ ID NO: 35695 - protein, 13 aa, BK virus
SSQGVSKKSFCSS

SEQ ID NO: 35696 - protein, 13 aa, BK virus
SQGVSKKSFCSSL

SEQ ID NO: 35697 - protein, 13 aa, BK virus
QGVSKKSFCSSLQ

SEQ ID NO: 35698 - protein, 13 aa, BK virus
GVSKKSFCSSLQF

SEQ ID NO: 35699 - protein, 13 aa, BK virus
VSKKSFCSSLQFL

SEQ ID NO: 35700 - protein, 13 aa, BK virus
GYRRYIIPNNMPQ

SEQ ID NO: 35701 - protein, 13 aa, BK virus
YRRYIIPNNMPQS

SEQ ID NO: 35702 - protein, 13 aa, BK virus
RRYIIPNNMPQSL

SEQ ID NO: 35703 - protein, 13 aa, BK virus
RYIIPNNMPQSLG

SEQ ID NO: 35704 - protein, 13 aa, BK virus
YIIPNNMPQSLGN

SEQ ID NO: 35705 - protein, 13 aa, BK virus
IIPNNMPQSLGNS

SEQ ID NO: 35706 - protein, 13 aa, BK virus
IPNNMPQSLGNSS

SEQ ID NO: 35707 - protein, 13 aa, BK virus
PNNMPQSLGNSSK

SEQ ID NO: 35708 - protein, 13 aa, BK virus
NNMPQSLGNSSKQ

SEQ ID NO: 35709 - protein, 13 aa, BK virus
NMPQSLGNSSKQR

SEQ ID NO: 35710 - protein, 13 aa, BK virus
MPQSLGNSSKQRR

SEQ ID NO: 35711 - protein, 13 aa, BK virus
PQSLGNSSKQRRT

SEQ ID NO: 35712 - protein, 13 aa, BK virus
QSLGNSSKQRRTP

SEQ ID NO: 35713 - protein, 13 aa, BK virus
SLGNSSKQRRTPM

SEQ ID NO: 35714 - protein, 13 aa, BK virus
LGNSSKQRRTPMP

SEQ ID NO: 35715 - protein, 13 aa, BK virus
GNSSKQRRTPMPR

SEQ ID NO: 35716 - protein, 13 aa, BK virus
NSSKQRRTPMPRI

SEQ ID NO: 35717 - protein, 13 aa, BK virus
SSKQRRTPMPRIK

SEQ ID NO: 35718 - protein, 13 aa, BK virus
SKQRRTPMPRIKV

SEQ ID NO: 35719 - protein, 13 aa, BK virus
KQRRTPMPRIKVL

SEQ ID NO: 35720 - protein, 13 aa, BK virus
QRRTPMPRIKVLN

SEQ ID NO: 35721 - protein, 13 aa, BK virus
RRTPMPRIKVLNI

SEQ ID NO: 35722 - protein, 13 aa, BK virus
RTPMPRIKVLNII

SEQ ID NO: 35723 - protein, 13 aa, BK virus
TPMPRIKVLNIIN

SEQ ID NO: 35724 - protein, 13 aa, BK virus
PMPRIKVLNIINK

SEQ ID NO: 35725 - protein, 13 aa, BK virus
MPRIKVLNIINKS

SEQ ID NO: 35726 - protein, 13 aa, BK virus
PRIKVLNIINKSI

SEQ ID NO: 35727 - protein, 13 aa, BK virus
RIKVLNIINKSIY

SEQ ID NO: 35728 - protein, 13 aa, BK virus
IKVLNIINKSIYT

SEQ ID NO: 35729 - protein, 13 aa, BK virus
KVLNIINKSIYTR

SEQ ID NO: 35730 - protein, 13 aa, BK virus
VLNIINKSIYTRK

SEQ ID NO: 35731 - protein, 13 aa, BK virus
LNIINKSIYTRKQ

SEQ ID NO: 35732 - protein, 13 aa, BK virus
NIINKSIYTRKQN

SEQ ID NO: 35733 - protein, 13 aa, BK virus
IINKSIYTRKQNI

SEQ ID NO: 35734 - protein, 13 aa, BK virus
INKSIYTRKQNII

SEQ ID NO: 35735 - protein, 13 aa, BK virus
NKSIYTRKQNIIV

SEQ ID NO: 35736 - protein, 13 aa, BK virus
KSIYTRKQNIIVL

SEQ ID NO: 35737 - protein, 13 aa, BK virus
SIYTRKQNIIVLI

SEQ ID NO: 35738 - protein, 13 aa, BK virus
IYTRKQNIIVLIW

SEQ ID NO: 35739 - protein, 13 aa, BK virus
YTRKQNIIVLIWV

SEQ ID NO: 35740 - protein, 13 aa, BK virus
TRKQNIIVLIWVK

SEQ ID NO: 35741 - protein, 13 aa, BK virus
RKQNIIVLIWVKQ

SEQ ID NO: 35742 - protein, 13 aa, BK virus
KQNIIVLIWVKQF

SEQ ID NO: 35743 - protein, 13 aa, BK virus
QNIIVLIWVKQFQ

SEQ ID NO: 35744 - protein, 13 aa, BK virus
NIIVLIWVKQFQS

SEQ ID NO: 35745 - protein, 13 aa, BK virus
IIVLIWVKQFQSH

SEQ ID NO: 35746 - protein, 13 aa, BK virus
IVLIWVKQFQSHA

SEQ ID NO: 35747 - protein, 13 aa, BK virus
LLIEAYSGNFVIP

SEQ ID NO: 35748 - protein, 13 aa, BK virus
LIEAYSGNFVIPI

SEQ ID NO: 35749 - protein, 13 aa, BK virus
IEAYSGNFVIPII

SEQ ID NO: 35750 - protein, 13 aa, BK virus
EAYSGNFVIPIIK

SEQ ID NO: 35751 - protein, 13 aa, BK virus
AYSGNFVIPIIKE

SEQ ID NO: 35752 - protein, 13 aa, BK virus
YSGNFVIPIIKEL

SEQ ID NO: 35753 - protein, 13 aa, BK virus
SGNFVIPIIKELI

SEQ ID NO: 35754 - protein, 13 aa, BK virus
GNFVIPIIKELIP

SEQ ID NO: 35755 - protein, 13 aa, BK virus
NFVIPIIKELIPY

SEQ ID NO: 35756 - protein, 13 aa, BK virus
FVIPIIKELIPYL

SEQ ID NO: 35757 - protein, 13 aa, BK virus
VIPIIKELIPYLS

SEQ ID NO: 35758 - protein, 13 aa, BK virus
SSKPSNSPRSTSN

SEQ ID NO: 35759 - protein, 13 aa, BK virus
SKPSNSPRSTSNY

SEQ ID NO: 35760 - protein, 13 aa, BK virus
KPSNSPRSTSNYS

SEQ ID NO: 35761 - protein, 13 aa, BK virus
PSNSPRSTSNYSI

SEQ ID NO: 35762 - protein, 13 aa, BK virus
SNSPRSTSNYSIC

SEQ ID NO: 35763 - protein, 13 aa, BK virus
NSPRSTSNYSICL

SEQ ID NO: 35764 - protein, 13 aa, BK virus
SPRSTSNYSICLR

SEQ ID NO: 35765 - protein, 13 aa, BK virus
PRSTSNYSICLRS

SEQ ID NO: 35766 - protein, 13 aa, BK virus
GTCYALYSSKGCN

SEQ ID NO: 35767 - protein, 13 aa, BK virus
TCYALYSSKGCNL

SEQ ID NO: 35768 - protein, 13 aa, BK virus
CYALYSSKGCNLN

SEQ ID NO: 35769 - protein, 13 aa, BK virus
YALYSSKGCNLNF

SEQ ID NO: 35770 - protein, 13 aa, BK virus
ALYSSKGCNLNFY

SEQ ID NO: 35771 - protein, 13 aa, BK virus
LYSSKGCNLNFYS

SEQ ID NO: 35772 - protein, 13 aa, BK virus
YSSKGCNLNFYSS

SEQ ID NO: 35773 - protein, 13 aa, BK virus
SSKGCNLNFYSSS

SEQ ID NO: 35774 - protein, 13 aa, BK virus
SKGCNLNFYSSSS

SEQ ID NO: 35775 - protein, 13 aa, BK virus
KGCNLNFYSSSSL

SEQ ID NO: 35776 - protein, 13 aa, BK virus
GCNLNFYSSSSLP

SEQ ID NO: 35777 - protein, 13 aa, BK virus
CNLNFYSSSSLPS

SEQ ID NO: 35778 - protein, 13 aa, BK virus
NLNFYSSSSLPSS

SEQ ID NO: 35779 - protein, 13 aa, BK virus
LNFYSSSSLPSSN

SEQ ID NO: 35780 - protein, 13 aa, BK virus
NFYSSSSLPSSNF

SEQ ID NO: 35781 - protein, 13 aa, BK virus
FYSSSSLPSSNFS

SEQ ID NO: 35782 - protein, 13 aa, BK virus
YSSSSLPSSNFSH

SEQ ID NO: 35783 - protein, 13 aa, BK virus
KSCGSSSLRYTGN

SEQ ID NO: 35784 - protein, 13 aa, BK virus
SSTHEPGNTKKKG

SEQ ID NO: 35785 - protein, 13 aa, BK virus
STHEPGNTKKKGL

SEQ ID NO: 35786 - protein, 13 aa, BK virus
THEPGNTKKKGLL

SEQ ID NO: 35787 - protein, 13 aa, BK virus
HEPGNTKKKGLLT

SEQ ID NO: 35788 - protein, 13 aa, BK virus
ESFTESFTAGKAV

SEQ ID NO: 35789 - protein, 13 aa, BK virus
SFTESFTAGKAVV

SEQ ID NO: 35790 - protein, 13 aa, BK virus
FTESFTAGKAVVL

SEQ ID NO: 35791 - protein, 13 aa, BK virus
TESFTAGKAVVLL

SEQ ID NO: 35792 - protein, 13 aa, BK virus
ESFTAGKAVVLLF

SEQ ID NO: 35793 - protein, 13 aa, BK virus
SFTAGKAVVLLFF

SEQ ID NO: 35794 - protein, 13 aa, BK virus
FTAGKAVVLLFFP

SEQ ID NO: 35795 - protein, 13 aa, BK virus
TAGKAVVLLFFPS

SEQ ID NO: 35796 - protein, 13 aa, BK virus
AGKAVVLLFFPST

SEQ ID NO: 35797 - protein, 13 aa, BK virus
GKAVVLLFFPSTL

SEQ ID NO: 35798 - protein, 13 aa, BK virus
KAVVLLFFPSTLS

SEQ ID NO: 35799 - protein, 13 aa, BK virus
AVVLLFFPSTLSS

SEQ ID NO: 35800 - protein, 13 aa, BK virus
VVLLFFPSTLSSP

SEQ ID NO: 35801 - protein, 13 aa, BK virus
VLLFFPSTLSSPL

SEQ ID NO: 35802 - protein, 13 aa, BK virus
LLFFPSTLSSPLQ

SEQ ID NO: 35803 - protein, 13 aa, BK virus
LFFPSTLSSPLQN

SEQ ID NO: 35804 - protein, 13 aa, BK virus
FFPSTLSSPLQNS

SEQ ID NO: 35805 - protein, 13 aa, BK virus
FPSTLSSPLQNSS

SEQ ID NO: 35806 - protein, 13 aa, BK virus
PSTLSSPLQNSSK

SEQ ID NO: 35807 - protein, 13 aa, BK virus
STLSSPLQNSSKS

SEQ ID NO: 35808 - protein, 13 aa, BK virus
TLSSPLQNSSKSS

SEQ ID NO: 35809 - protein, 13 aa, BK virus
LSSPLQNSSKSSK

SEQ ID NO: 35810 - protein, 13 aa, BK virus
SSPLQNSSKSSKI

SEQ ID NO: 35811 - protein, 13 aa, BK virus
SPLQNSSKSSKIK

SEQ ID NO: 35812 - protein, 13 aa, BK virus
PLQNSSKSSKIKI

SEQ ID NO: 35813 - protein, 13 aa, BK virus
LQNSSKSSKIKIK

SEQ ID NO: 35814 - protein, 13 aa, BK virus
QNSSKSSKIKIKI

SEQ ID NO: 35815 - protein, 13 aa, BK virus
NSSKSSKIKIKIL

SEQ ID NO: 35816 - protein, 13 aa, BK virus
ALFFVPVQVLPTF

SEQ ID NO: 35817 - protein, 13 aa, BK virus
LFFVPVQVLPTFT

SEQ ID NO: 35818 - protein, 13 aa, BK virus
FFVPVQVLPTFTE

SEQ ID NO: 35819 - protein, 13 aa, BK virus
FVPVQVLPTFTEA

SEQ ID NO: 35820 - protein, 13 aa, BK virus
VPVQVLPTFTEAC

SEQ ID NO: 35821 - protein, 13 aa, BK virus
PVQVLPTFTEACR

SEQ ID NO: 35822 - protein, 13 aa, BK virus
VQVLPTFTEACRD

SEQ ID NO: 35823 - protein, 13 aa, BK virus
QVLPTFTEACRDS

SEQ ID NO: 35824 - protein, 13 aa, BK virus
VLPTFTEACRDSW

SEQ ID NO: 35825 - protein, 13 aa, BK virus
LPTFTEACRDSWR

SEQ ID NO: 35826 - protein, 13 aa, BK virus
PTFTEACRDSWRR

SEQ ID NO: 35827 - protein, 13 aa, BK virus
TFTEACRDSWRRT

SEQ ID NO: 35828 - protein, 13 aa, BK virus
FTEACRDSWRRTM

SEQ ID NO: 35829 - protein, 13 aa, BK virus
TEACRDSWRRTMA

SEQ ID NO: 35830 - protein, 13 aa, BK virus
EACRDSWRRTMAF

SEQ ID NO: 35831 - protein, 13 aa, BK virus
ACRDSWRRTMAFV

SEQ ID NO: 35832 - protein, 13 aa, BK virus
CRDSWRRTMAFVQ

SEQ ID NO: 35833 - protein, 13 aa, BK virus
RDSWRRTMAFVQF

SEQ ID NO: 35834 - protein, 13 aa, BK virus
DSWRRTMAFVQFN

SEQ ID NO: 35835 - protein, 13 aa, BK virus
SWRRTMAFVQFNW

SEQ ID NO: 35836 - protein, 13 aa, BK virus
WRRTMAFVQFNWG

SEQ ID NO: 35837 - protein, 13 aa, BK virus
RRTMAFVQFNWGQ

SEQ ID NO: 35838 - protein, 13 aa, BK virus
RTMAFVQFNWGQG

SEQ ID NO: 35839 - protein, 13 aa, BK virus
TMAFVQFNWGQGQ

SEQ ID NO: 35840 - protein, 13 aa, BK virus
MAFVQFNWGQGQD

SEQ ID NO: 35841 - protein, 13 aa, BK virus
AFVQFNWGQGQDS

SEQ ID NO: 35842 - protein, 13 aa, BK virus
ARKTCLSCTFLPE

SEQ ID NO: 35843 - protein, 13 aa, BK virus
RKTCLSCTFLPEV

SEQ ID NO: 35844 - protein, 13 aa, BK virus
KTCLSCTFLPEVM

SEQ ID NO: 35845 - protein, 13 aa, BK virus
TCLSCTFLPEVMV

SEQ ID NO: 35846 - protein, 13 aa, BK virus
CLSCTFLPEVMVW

SEQ ID NO: 35847 - protein, 13 aa, BK virus
LSCTFLPEVMVWL

SEQ ID NO: 35848 - protein, 13 aa, BK virus
SCTFLPEVMVWLH

SEQ ID NO: 35849 - protein, 13 aa, BK virus
CTFLPEVMVWLHS

SEQ ID NO: 35850 - protein, 13 aa, BK virus
TFLPEVMVWLHSM

SEQ ID NO: 35851 - protein, 13 aa, BK virus
FLPEVMVWLHSMG

SEQ ID NO: 35852 - protein, 13 aa, BK virus
LPEVMVWLHSMGK

SEQ ID NO: 35853 - protein, 13 aa, BK virus
PEVMVWLHSMGKQ

SEQ ID NO: 35854 - protein, 13 aa, BK virus
EVMVWLHSMGKQL

SEQ ID NO: 35855 - protein, 13 aa, BK virus
VMVWLHSMGKQLL

SEQ ID NO: 35856 - protein, 13 aa, BK virus
MVWLHSMGKQLLP

SEQ ID NO: 35857 - protein, 13 aa, BK virus
VWLHSMGKQLLPV

SEQ ID NO: 35858 - protein, 13 aa, BK virus
WLHSMGKQLLPVS

SEQ ID NO: 35859 - protein, 13 aa, BK virus
LHSMGKQLLPVSH

SEQ ID NO: 35860 - protein, 13 aa, BK virus
HSMGKQLLPVSHA

SEQ ID NO: 35861 - protein, 13 aa, BK virus
SMGKQLLPVSHAL

SEQ ID NO: 35862 - protein, 13 aa, BK virus
MGKQLLPVSHALS

SEQ ID NO: 35863 - protein, 13 aa, BK virus
GKQLLPVSHALSF

SEQ ID NO: 35864 - protein, 13 aa, BK virus
KQLLPVSHALSFL

SEQ ID NO: 35865 - protein, 13 aa, BK virus
QLLPVSHALSFLR

SEQ ID NO: 35866 - protein, 13 aa, BK virus
LLPVSHALSFLRS

SEQ ID NO: 35867 - protein, 13 aa, BK virus
LPVSHALSFLRSW

SEQ ID NO: 35868 - protein, 13 aa, BK virus
PVSHALSFLRSWF

SEQ ID NO: 35869 - protein, 13 aa, BK virus
VSHALSFLRSWFG

SEQ ID NO: 35870 - protein, 13 aa, BK virus
SHALSFLRSWFGC

SEQ ID NO: 35871 - protein, 13 aa, BK virus
HALSFLRSWFGCI

SEQ ID NO: 35872 - protein, 13 aa, BK virus
ALSFLRSWFGCIP

SEQ ID NO: 35873 - protein, 13 aa, BK virus
LSFLRSWFGCIPL

SEQ ID NO: 35874 - protein, 13 aa, BK virus
EAEAASASTLSLK

SEQ ID NO: 35875 - protein, 13 aa, BK virus
GLAKLFGEIPILL

SEQ ID NO: 35876 - protein, 13 aa, BK virus
LAKLFGEIPILLQ

SEQ ID NO: 35877 - protein, 13 aa, BK virus
AKLFGEIPILLQF

SEQ ID NO: 35878 - protein, 13 aa, BK virus
KLFGEIPILLQFL

SEQ ID NO: 35879 - protein, 13 aa, BK virus
LFGEIPILLQFLQ

SEQ ID NO: 35880 - protein, 14 aa, BK virus
MDKVLNREESMELM

SEQ ID NO: 35881 - protein, 14 aa, BK virus
DKVLNREESMELMD

SEQ ID NO: 35882 - protein, 14 aa, BK virus
KVLNREESMELMDL

SEQ ID NO: 35883 - protein, 14 aa, BK virus
VLNREESMELMDLL

SEQ ID NO: 35884 - protein, 14 aa, BK virus
LNREESMELMDLLG

SEQ ID NO: 35885 - protein, 14 aa, BK virus
NREESMELMDLLGL

SEQ ID NO: 35886 - protein, 14 aa, BK virus
REESMELMDLLGLE

SEQ ID NO: 35887 - protein, 14 aa, BK virus
EESMELMDLLGLER

SEQ ID NO: 35888 - protein, 14 aa, BK virus
ESMELMDLLGLERA

SEQ ID NO: 35889 - protein, 14 aa, BK virus
SMELMDLLGLERAA

SEQ ID NO: 35890 - protein, 14 aa, BK virus
MELMDLLGLERAAW

SEQ ID NO: 35891 - protein, 14 aa, BK virus
ELMDLLGLERAAWG

SEQ ID NO: 35892 - protein, 14 aa, BK virus
LMDLLGLERAAWGN

SEQ ID NO: 35893 - protein, 14 aa, BK virus
MDLLGLERAAWGNL

SEQ ID NO: 35894 - protein, 14 aa, BK virus
DLLGLERAAWGNLP

SEQ ID NO: 35895 - protein, 14 aa, BK virus
LLGLERAAWGNLPL

SEQ ID NO: 35896 - protein, 14 aa, BK virus
LGLERAAWGNLPLM

SEQ ID NO: 35897 - protein, 14 aa, BK virus
GLERAAWGNLPLMR

SEQ ID NO: 35898 - protein, 14 aa, BK virus
LERAAWGNLPLMRK

SEQ ID NO: 35899 - protein, 14 aa, BK virus
ERAAWGNLPLMRKA

SEQ ID NO: 35900 - protein, 14 aa, BK virus
RAAWGNLPLMRKAY

SEQ ID NO: 35901 - protein, 14 aa, BK virus
AAWGNLPLMRKAYL

SEQ ID NO: 35902 - protein, 14 aa, BK virus
AWGNLPLMRKAYLR

SEQ ID NO: 35903 - protein, 14 aa, BK virus
WGNLPLMRKAYLRK

SEQ ID NO: 35904 - protein, 14 aa, BK virus
GNLPLMRKAYLRKC

SEQ ID NO: 35905 - protein, 14 aa, BK virus
NLPLMRKAYLRKCK

SEQ ID NO: 35906 - protein, 14 aa, BK virus
LPLMRKAYLRKCKE

SEQ ID NO: 35907 - protein, 14 aa, BK virus
PLMRKAYLRKCKEF

SEQ ID NO: 35908 - protein, 14 aa, BK virus
LMRKAYLRKCKEFH

SEQ ID NO: 35909 - protein, 14 aa, BK virus
MRKAYLRKCKEFHP

SEQ ID NO: 35910 - protein, 14 aa, BK virus
RKAYLRKCKEFHPD

SEQ ID NO: 35911 - protein, 14 aa, BK virus
KAYLRKCKEFHPDK

SEQ ID NO: 35912 - protein, 14 aa, BK virus
AYLRKCKEFHPDKG

SEQ ID NO: 35913 - protein, 14 aa, BK virus
YLRKCKEFHPDKGG

SEQ ID NO: 35914 - protein, 14 aa, BK virus
LRKCKEFHPDKGGD

SEQ ID NO: 35915 - protein, 14 aa, BK virus
RKCKEFHPDKGGDE

SEQ ID NO: 35916 - protein, 14 aa, BK virus
KCKEFHPDKGGDED

SEQ ID NO: 35917 - protein, 14 aa, BK virus
CKEFHPDKGGDEDK

SEQ ID NO: 35918 - protein, 14 aa, BK virus
KEFHPDKGGDEDKM

SEQ ID NO: 35919 - protein, 14 aa, BK virus
EFHPDKGGDEDKMK

SEQ ID NO: 35920 - protein, 14 aa, BK virus
FHPDKGGDEDKMKR

SEQ ID NO: 35921 - protein, 14 aa, BK virus
HPDKGGDEDKMKRM

SEQ ID NO: 35922 - protein, 14 aa, BK virus
PDKGGDEDKMKRMN

SEQ ID NO: 35923 - protein, 14 aa, BK virus
DKGGDEDKMKRMNT

SEQ ID NO: 35924 - protein, 14 aa, BK virus
KGGDEDKMKRMNTL

SEQ ID NO: 35925 - protein, 14 aa, BK virus
GGDEDKMKRMNTLY

SEQ ID NO: 35926 - protein, 14 aa, BK virus
GDEDKMKRMNTLYK

SEQ ID NO: 35927 - protein, 14 aa, BK virus
DEDKMKRMNTLYKK

SEQ ID NO: 35928 - protein, 14 aa, BK virus
EDKMKRMNTLYKKM

SEQ ID NO: 35929 - protein, 14 aa, BK virus
DKMKRMNTLYKKME

SEQ ID NO: 35930 - protein, 14 aa, BK virus
KMKRMNTLYKKMEQ

SEQ ID NO: 35931 - protein, 14 aa, BK virus
MKRMNTLYKKMEQD

SEQ ID NO: 35932 - protein, 14 aa, BK virus
KRMNTLYKKMEQDV

SEQ ID NO: 35933 - protein, 14 aa, BK virus
RMNTLYKKMEQDVK

SEQ ID NO: 35934 - protein, 14 aa, BK virus
MNTLYKKMEQDVKV

SEQ ID NO: 35935 - protein, 14 aa, BK virus
NTLYKKMEQDVKVA

SEQ ID NO: 35936 - protein, 14 aa, BK virus
TLYKKMEQDVKVAH

SEQ ID NO: 35937 - protein, 14 aa, BK virus
LYKKMEQDVKVAHQ

SEQ ID NO: 35938 - protein, 14 aa, BK virus
YKKMEQDVKVAHQP

SEQ ID NO: 35939 - protein, 14 aa, BK virus
KKMEQDVKVAHQPD

SEQ ID NO: 35940 - protein, 14 aa, BK virus
KMEQDVKVAHQPDF

SEQ ID NO: 35941 - protein, 14 aa, BK virus
MEQDVKVAHQPDFG

SEQ ID NO: 35942 - protein, 14 aa, BK virus
EQDVKVAHQPDFGT

SEQ ID NO: 35943 - protein, 14 aa, BK virus
QDVKVAHQPDFGTW

SEQ ID NO: 35944 - protein, 14 aa, BK virus
DVKVAHQPDFGTWS

SEQ ID NO: 35945 - protein, 14 aa, BK virus
VKVAHQPDFGTWSS

SEQ ID NO: 35946 - protein, 14 aa, BK virus
KVAHQPDFGTWSSS

SEQ ID NO: 35947 - protein, 14 aa, BK virus
VAHQPDFGTWSSSE

SEQ ID NO: 35948 - protein, 14 aa, BK virus
AHQPDFGTWSSSEV

SEQ ID NO: 35949 - protein, 14 aa, BK virus
HQPDFGTWSSSEVC

SEQ ID NO: 35950 - protein, 14 aa, BK virus
QPDFGTWSSSEVCA

SEQ ID NO: 35951 - protein, 14 aa, BK virus
PDFGTWSSSEVCAD

SEQ ID NO: 35952 - protein, 14 aa, BK virus
DFGTWSSSEVCADF

SEQ ID NO: 35953 - protein, 14 aa, BK virus
FGTWSSSEVCADFP

SEQ ID NO: 35954 - protein, 14 aa, BK virus
GTWSSSEVCADFPL

SEQ ID NO: 35955 - protein, 14 aa, BK virus
TWSSSEVCADFPLC

SEQ ID NO: 35956 - protein, 14 aa, BK virus
WSSSEVCADFPLCP

SEQ ID NO: 35957 - protein, 14 aa, BK virus
SSSEVCADFPLCPD

SEQ ID NO: 35958 - protein, 14 aa, BK virus
SSEVCADFPLCPDT

SEQ ID NO: 35959 - protein, 14 aa, BK virus
SEVCADFPLCPDTL

SEQ ID NO: 35960 - protein, 14 aa, BK virus
EVCADFPLCPDTLY

SEQ ID NO: 35961 - protein, 14 aa, BK virus
VCADFPLCPDTLYC

SEQ ID NO: 35962 - protein, 14 aa, BK virus
CADFPLCPDTLYCK

SEQ ID NO: 35963 - protein, 14 aa, BK virus
ADFPLCPDTLYCKE

SEQ ID NO: 35964 - protein, 14 aa, BK virus
DFPLCPDTLYCKEW

SEQ ID NO: 35965 - protein, 14 aa, BK virus
FPLCPDTLYCKEWP

SEQ ID NO: 35966 - protein, 14 aa, BK virus
PLCPDTLYCKEWPI

SEQ ID NO: 35967 - protein, 14 aa, BK virus
LCPDTLYCKEWPIC

SEQ ID NO: 35968 - protein, 14 aa, BK virus
CPDTLYCKEWPICS

SEQ ID NO: 35969 - protein, 14 aa, BK virus
PDTLYCKEWPICSK

SEQ ID NO: 35970 - protein, 14 aa, BK virus
DTLYCKEWPICSKK

SEQ ID NO: 35971 - protein, 14 aa, BK virus
TLYCKEWPICSKKP

SEQ ID NO: 35972 - protein, 14 aa, BK virus
LYCKEWPICSKKPS

SEQ ID NO: 35973 - protein, 14 aa, BK virus
YCKEWPICSKKPSV

SEQ ID NO: 35974 - protein, 14 aa, BK virus
CKEWPICSKKPSVH

SEQ ID NO: 35975 - protein, 14 aa, BK virus
KEWPICSKKPSVHC

SEQ ID NO: 35976 - protein, 14 aa, BK virus
EWPICSKKPSVHCP

SEQ ID NO: 35977 - protein, 14 aa, BK virus
WPICSKKPSVHCPC

SEQ ID NO: 35978 - protein, 14 aa, BK virus
PICSKKPSVHCPCM

SEQ ID NO: 35979 - protein, 14 aa, BK virus
ICSKKPSVHCPCML

SEQ ID NO: 35980 - protein, 14 aa, BK virus
CSKKPSVHCPCMLC

SEQ ID NO: 35981 - protein, 14 aa, BK virus
SKKPSVHCPCMLCQ

SEQ ID NO: 35982 - protein, 14 aa, BK virus
KKPSVHCPCMLCQL

SEQ ID NO: 35983 - protein, 14 aa, BK virus
KPSVHCPCMLCQLR

SEQ ID NO: 35984 - protein, 14 aa, BK virus
PSVHCPCMLCQLRL

SEQ ID NO: 35985 - protein, 14 aa, BK virus
SVHCPCMLCQLRLR

SEQ ID NO: 35986 - protein, 14 aa, BK virus
VHCPCMLCQLRLRH

SEQ ID NO: 35987 - protein, 14 aa, BK virus
HCPCMLCQLRLRHL

SEQ ID NO: 35988 - protein, 14 aa, BK virus
CPCMLCQLRLRHLN

SEQ ID NO: 35989 - protein, 14 aa, BK virus
PCMLCQLRLRHLNR

SEQ ID NO: 35990 - protein, 14 aa, BK virus
CMLCQLRLRHLNRK

SEQ ID NO: 35991 - protein, 14 aa, BK virus
MLCQLRLRHLNRKF

SEQ ID NO: 35992 - protein, 14 aa, BK virus
LCQLRLRHLNRKFL

SEQ ID NO: 35993 - protein, 14 aa, BK virus
CQLRLRHLNRKFLR

SEQ ID NO: 35994 - protein, 14 aa, BK virus
QLRLRHLNRKFLRK

SEQ ID NO: 35995 - protein, 14 aa, BK virus
LRLRHLNRKFLRKE

SEQ ID NO: 35996 - protein, 14 aa, BK virus
RLRHLNRKFLRKEP

SEQ ID NO: 35997 - protein, 14 aa, BK virus
LRHLNRKFLRKEPL

SEQ ID NO: 35998 - protein, 14 aa, BK virus
RHLNRKFLRKEPLV

SEQ ID NO: 35999 - protein, 14 aa, BK virus
HLNRKFLRKEPLVW

SEQ ID NO: 36000 - protein, 14 aa, BK virus
LNRKFLRKEPLVWI

SEQ ID NO: 36001 - protein, 14 aa, BK virus
NRKFLRKEPLVWID

SEQ ID NO: 36002 - protein, 14 aa, BK virus
RKFLRKEPLVWIDC

SEQ ID NO: 36003 - protein, 14 aa, BK virus
KFLRKEPLVWIDCY

SEQ ID NO: 36004 - protein, 14 aa, BK virus
FLRKEPLVWIDCYC

SEQ ID NO: 36005 - protein, 14 aa, BK virus
LRKEPLVWIDCYCI

SEQ ID NO: 36006 - protein, 14 aa, BK virus
RKEPLVWIDCYCID

SEQ ID NO: 36007 - protein, 14 aa, BK virus
KEPLVWIDCYCIDC

SEQ ID NO: 36008 - protein, 14 aa, BK virus
EPLVWIDCYCIDCF

SEQ ID NO: 36009 - protein, 14 aa, BK virus
PLVWIDCYCIDCFT

SEQ ID NO: 36010 - protein, 14 aa, BK virus
LVWIDCYCIDCFTQ

SEQ ID NO: 36011 - protein, 14 aa, BK virus
VWIDCYCIDCFTQW

SEQ ID NO: 36012 - protein, 14 aa, BK virus
WIDCYCIDCFTQWF

SEQ ID NO: 36013 - protein, 14 aa, BK virus
IDCYCIDCFTQWFG

SEQ ID NO: 36014 - protein, 14 aa, BK virus
DCYCIDCFTQWFGL

SEQ ID NO: 36015 - protein, 14 aa, BK virus
CYCIDCFTQWFGLD

SEQ ID NO: 36016 - protein, 14 aa, BK virus
YCIDCFTQWFGLDL

SEQ ID NO: 36017 - protein, 14 aa, BK virus
CIDCFTQWFGLDLT

SEQ ID NO: 36018 - protein, 14 aa, BK virus
IDCFTQWFGLDLTE

SEQ ID NO: 36019 - protein, 14 aa, BK virus
DCFTQWFGLDLTEE

SEQ ID NO: 36020 - protein, 14 aa, BK virus
CFTQWFGLDLTEET

SEQ ID NO: 36021 - protein, 14 aa, BK virus
FTQWFGLDLTEETL

SEQ ID NO: 36022 - protein, 14 aa, BK virus
TQWFGLDLTEETLQ

SEQ ID NO: 36023 - protein, 14 aa, BK virus
QWFGLDLTEETLQW

SEQ ID NO: 36024 - protein, 14 aa, BK virus
WFGLDLTEETLQWW

SEQ ID NO: 36025 - protein, 14 aa, BK virus
FGLDLTEETLQWWV

SEQ ID NO: 36026 - protein, 14 aa, BK virus
GLDLTEETLQWWVQ

SEQ ID NO: 36027 - protein, 14 aa, BK virus
LDLTEETLQWWVQI

SEQ ID NO: 36028 - protein, 14 aa, BK virus
DLTEETLQWWVQII

SEQ ID NO: 36029 - protein, 14 aa, BK virus
LTEETLQWWVQIIG

SEQ ID NO: 36030 - protein, 14 aa, BK virus
TEETLQWWVQIIGE

SEQ ID NO: 36031 - protein, 14 aa, BK virus
EETLQWWVQIIGET

SEQ ID NO: 36032 - protein, 14 aa, BK virus
ETLQWWVQIIGETP

SEQ ID NO: 36033 - protein, 14 aa, BK virus
TLQWWVQIIGETPF

SEQ ID NO: 36034 - protein, 14 aa, BK virus
LQWWVQIIGETPFR

SEQ ID NO: 36035 - protein, 14 aa, BK virus
QWWVQIIGETPFRD

SEQ ID NO: 36036 - protein, 14 aa, BK virus
WWVQIIGETPFRDL

SEQ ID NO: 36037 - protein, 14 aa, BK virus
WVQIIGETPFRDLK

SEQ ID NO: 36038 - protein, 14 aa, BK virus
VQIIGETPFRDLKL

SEQ ID NO: 36039 - protein, 14 aa, BK virus
KALSNYFFYRCQPM

SEQ ID NO: 36040 - protein, 14 aa, BK virus
ALSNYFFYRCQPME

SEQ ID NO: 36041 - protein, 14 aa, BK virus
LSNYFFYRCQPMEQ

SEQ ID NO: 36042 - protein, 14 aa, BK virus
SNYFFYRCQPMEQK

SEQ ID NO: 36043 - protein, 14 aa, BK virus
NYFFYRCQPMEQKS

SEQ ID NO: 36044 - protein, 14 aa, BK virus
YFFYRCQPMEQKSG

SEQ ID NO: 36045 - protein, 14 aa, BK virus
FFYRCQPMEQKSGS

SEQ ID NO: 36046 - protein, 14 aa, BK virus
FYRCQPMEQKSGSP

SEQ ID NO: 36047 - protein, 14 aa, BK virus
YRCQPMEQKSGSPG

SEQ ID NO: 36048 - protein, 14 aa, BK virus
RCQPMEQKSGSPGG

SEQ ID NO: 36049 - protein, 14 aa, BK virus
CQPMEQKSGSPGGV

SEQ ID NO: 36050 - protein, 14 aa, BK virus
QPMEQKSGSPGGVP

SEQ ID NO: 36051 - protein, 14 aa, BK virus
PMEQKSGSPGGVPL

SEQ ID NO: 36052 - protein, 14 aa, BK virus
MEQKSGSPGGVPLM

SEQ ID NO: 36053 - protein, 14 aa, BK virus
EQKSGSPGGVPLMK

SEQ ID NO: 36054 - protein, 14 aa, BK virus
QKSGSPGGVPLMKN

SEQ ID NO: 36055 - protein, 14 aa, BK virus
KSGSPGGVPLMKNG

SEQ ID NO: 36056 - protein, 14 aa, BK virus
SGSPGGVPLMKNGM

SEQ ID NO: 36057 - protein, 14 aa, BK virus
GSPGGVPLMKNGMK

SEQ ID NO: 36058 - protein, 14 aa, BK virus
SPGGVPLMKNGMKI

SEQ ID NO: 36059 - protein, 14 aa, BK virus
PGGVPLMKNGMKIY

SEQ ID NO: 36060 - protein, 14 aa, BK virus
GGVPLMKNGMKIYF

SEQ ID NO: 36061 - protein, 14 aa, BK virus
GVPLMKNGMKIYFA

SEQ ID NO: 36062 - protein, 14 aa, BK virus
VPLMKNGMKIYFAM

SEQ ID NO: 36063 - protein, 14 aa, BK virus
PLMKNGMKIYFAMK

SEQ ID NO: 36064 - protein, 14 aa, BK virus
LMKNGMKIYFAMKI

SEQ ID NO: 36065 - protein, 14 aa, BK virus
MKNGMKIYFAMKIC

SEQ ID NO: 36066 - protein, 14 aa, BK virus
KNGMKIYFAMKICL

SEQ ID NO: 36067 - protein, 14 aa, BK virus
NGMKIYFAMKICLP

SEQ ID NO: 36068 - protein, 14 aa, BK virus
GMKIYFAMKICLPV

SEQ ID NO: 36069 - protein, 14 aa, BK virus
MKIYFAMKICLPVM

SEQ ID NO: 36070 - protein, 14 aa, BK virus
KIYFAMKICLPVMK

SEQ ID NO: 36071 - protein, 14 aa, BK virus
IYFAMKICLPVMKK

SEQ ID NO: 36072 - protein, 14 aa, BK virus
YFAMKICLPVMKKQ

SEQ ID NO: 36073 - protein, 14 aa, BK virus
FAMKICLPVMKKQQ

SEQ ID NO: 36074 - protein, 14 aa, BK virus
AMKICLPVMKKQQQ

SEQ ID NO: 36075 - protein, 14 aa, BK virus
MKICLPVMKKQQQI

SEQ ID NO: 36076 - protein, 14 aa, BK virus
KICLPVMKKQQQIL

SEQ ID NO: 36077 - protein, 14 aa, BK virus
ICLPVMKKQQQILN

SEQ ID NO: 36078 - protein, 14 aa, BK virus
CLPVMKKQQQILNT

SEQ ID NO: 36079 - protein, 14 aa, BK virus
LPVMKKQQQILNTQ

SEQ ID NO: 36080 - protein, 14 aa, BK virus
PVMKKQQQILNTQH

SEQ ID NO: 36081 - protein, 14 aa, BK virus
VMKKQQQILNTQHH

SEQ ID NO: 36082 - protein, 14 aa, BK virus
MKKQQQILNTQHHP

SEQ ID NO: 36083 - protein, 14 aa, BK virus
KKQQQILNTQHHPK

SEQ ID NO: 36084 - protein, 14 aa, BK virus
KQQQILNTQHHPKK

SEQ ID NO: 36085 - protein, 14 aa, BK virus
QQQILNTQHHPKKK

SEQ ID NO: 36086 - protein, 14 aa, BK virus
QQILNTQHHPKKKE

SEQ ID NO: 36087 - protein, 14 aa, BK virus
QILNTQHHPKKKER

SEQ ID NO: 36088 - protein, 14 aa, BK virus
KTLKTFPLIYTSFL

SEQ ID NO: 36089 - protein, 14 aa, BK virus
TLKTFPLIYTSFLV

SEQ ID NO: 36090 - protein, 14 aa, BK virus
LKTFPLIYTSFLVK

SEQ ID NO: 36091 - protein, 14 aa, BK virus
KTFPLIYTSFLVKL

SEQ ID NO: 36092 - protein, 14 aa, BK virus
TFPLIYTSFLVKLY

SEQ ID NO: 36093 - protein, 14 aa, BK virus
FPLIYTSFLVKLYL

SEQ ID NO: 36094 - protein, 14 aa, BK virus
PLIYTSFLVKLYLV

SEQ ID NO: 36095 - protein, 14 aa, BK virus
LIYTSFLVKLYLVI

SEQ ID NO: 36096 - protein, 14 aa, BK virus
IYTSFLVKLYLVIE

SEQ ID NO: 36097 - protein, 14 aa, BK virus
YTSFLVKLYLVIEP

SEQ ID NO: 36098 - protein, 14 aa, BK virus
TSFLVKLYLVIEPL

SEQ ID NO: 36099 - protein, 14 aa, BK virus
SFLVKLYLVIEPLP

SEQ ID NO: 36100 - protein, 14 aa, BK virus
FLVKLYLVIEPLPA

SEQ ID NO: 36101 - protein, 14 aa, BK virus
LVKLYLVIEPLPAL

SEQ ID NO: 36102 - protein, 14 aa, BK virus
VKLYLVIEPLPALL

SEQ ID NO: 36103 - protein, 14 aa, BK virus
KLYLVIEPLPALLC

SEQ ID NO: 36104 - protein, 14 aa, BK virus
LYLVIEPLPALLCI

SEQ ID NO: 36105 - protein, 14 aa, BK virus
YLVIEPLPALLCIL

SEQ ID NO: 36106 - protein, 14 aa, BK virus
LVIEPLPALLCILL

SEQ ID NO: 36107 - protein, 14 aa, BK virus
VIEPLPALLCILLK

SEQ ID NO: 36108 - protein, 14 aa, BK virus
IEPLPALLCILLKK

SEQ ID NO: 36109 - protein, 14 aa, BK virus
EPLPALLCILLKKK

SEQ ID NO: 36110 - protein, 14 aa, BK virus
PLPALLCILLKKKL

SEQ ID NO: 36111 - protein, 14 aa, BK virus
LPALLCILLKKKLK

SEQ ID NO: 36112 - protein, 14 aa, BK virus
PALLCILLKKKLKF

SEQ ID NO: 36113 - protein, 14 aa, BK virus
ALLCILLKKKLKFC

SEQ ID NO: 36114 - protein, 14 aa, BK virus
LLCILLKKKLKFCI

SEQ ID NO: 36115 - protein, 14 aa, BK virus
LCILLKKKLKFCIK

SEQ ID NO: 36116 - protein, 14 aa, BK virus
CILLKKKLKFCIKN

SEQ ID NO: 36117 - protein, 14 aa, BK virus
ILLKKKLKFCIKNL

SEQ ID NO: 36118 - protein, 14 aa, BK virus
LLKKKLKFCIKNLW

SEQ ID NO: 36119 - protein, 14 aa, BK virus
LKKKLKFCIKNLWK

SEQ ID NO: 36120 - protein, 14 aa, BK virus
KKKLKFCIKNLWKN

SEQ ID NO: 36121 - protein, 14 aa, BK virus
KKLKFCIKNLWKNI

SEQ ID NO: 36122 - protein, 14 aa, BK virus
KLKFCIKNLWKNIL

SEQ ID NO: 36123 - protein, 14 aa, BK virus
LLLVDTCVLGIILY

SEQ ID NO: 36124 - protein, 14 aa, BK virus
LLVDTCVLGIILYS

SEQ ID NO: 36125 - protein, 14 aa, BK virus
LVDTCVLGIILYSF

SEQ ID NO: 36126 - protein, 14 aa, BK virus
LHIDIEFLQLIISV

SEQ ID NO: 36127 - protein, 14 aa, BK virus
HIDIEFLQLIISVK

SEQ ID NO: 36128 - protein, 14 aa, BK virus
IDIEFLQLIISVKS

SEQ ID NO: 36129 - protein, 14 aa, BK virus
DIEFLQLIISVKSC

SEQ ID NO: 36130 - protein, 14 aa, BK virus
IEFLQLIISVKSCV

SEQ ID NO: 36131 - protein, 14 aa, BK virus
EFLQLIISVKSCVP

SEQ ID NO: 36132 - protein, 14 aa, BK virus
FLQLIISVKSCVPL

SEQ ID NO: 36133 - protein, 14 aa, BK virus
LQLIISVKSCVPLV

SEQ ID NO: 36134 - protein, 14 aa, BK virus
QLIISVKSCVPLVF

SEQ ID NO: 36135 - protein, 14 aa, BK virus
FVRVLIRNTYYIVP

SEQ ID NO: 36136 - protein, 14 aa, BK virus
RSMILAQKSLKKQS

SEQ ID NO: 36137 - protein, 14 aa, BK virus
SMILAQKSLKKQSR

SEQ ID NO: 36138 - protein, 14 aa, BK virus
MILAQKSLKKQSRC

SEQ ID NO: 36139 - protein, 14 aa, BK virus
ILAQKSLKKQSRCL

SEQ ID NO: 36140 - protein, 14 aa, BK virus
LAQKSLKKQSRCLG

SEQ ID NO: 36141 - protein, 14 aa, BK virus
AQKSLKKQSRCLGN

SEQ ID NO: 36142 - protein, 14 aa, BK virus
RSVKSVRKKTSLIT

SEQ ID NO: 36143 - protein, 14 aa, BK virus
SVKSVRKKTSLITL

SEQ ID NO: 36144 - protein, 14 aa, BK virus
VKSVRKKTSLITLS

SEQ ID NO: 36145 - protein, 14 aa, BK virus
KSVRKKTSLITLSI

SEQ ID NO: 36146 - protein, 14 aa, BK virus
SVRKKTSLITLSIM

SEQ ID NO: 36147 - protein, 14 aa, BK virus
VRKKTSLITLSIMK

SEQ ID NO: 36148 - protein, 14 aa, BK virus
RKKTSLITLSIMKS

SEQ ID NO: 36149 - protein, 14 aa, BK virus
KKTSLITLSIMKST

SEQ ID NO: 36150 - protein, 14 aa, BK virus
KTSLITLSIMKSTL

SEQ ID NO: 36151 - protein, 14 aa, BK virus
TSLITLSIMKSTLQ

SEQ ID NO: 36152 - protein, 14 aa, BK virus
SLITLSIMKSTLQM

SEQ ID NO: 36153 - protein, 14 aa, BK virus
LITLSIMKSTLQML

SEQ ID NO: 36154 - protein, 14 aa, BK virus
ITLSIMKSTLQMLL

SEQ ID NO: 36155 - protein, 14 aa, BK virus
TLSIMKSTLQMLLF

SEQ ID NO: 36156 - protein, 14 aa, BK virus
LSIMKSTLQMLLFL

SEQ ID NO: 36157 - protein, 14 aa, BK virus
SIMKSTLQMLLFLQ

SEQ ID NO: 36158 - protein, 14 aa, BK virus
IMKSTLQMLLFLQK

SEQ ID NO: 36159 - protein, 14 aa, BK virus
MKSTLQMLLFLQKV

SEQ ID NO: 36160 - protein, 14 aa, BK virus
KSTLQMLLFLQKVK

SEQ ID NO: 36161 - protein, 14 aa, BK virus
STLQMLLFLQKVKI

SEQ ID NO: 36162 - protein, 14 aa, BK virus
TLQMLLFLQKVKIK

SEQ ID NO: 36163 - protein, 14 aa, BK virus
LQMLLFLQKVKIKK

SEQ ID NO: 36164 - protein, 14 aa, BK virus
QMLLFLQKVKIKKV

SEQ ID NO: 36165 - protein, 14 aa, BK virus
MLLFLQKVKIKKVF

SEQ ID NO: 36166 - protein, 14 aa, BK virus
LLFLQKVKIKKVFV

SEQ ID NO: 36167 - protein, 14 aa, BK virus
LFLQKVKIKKVFVS

SEQ ID NO: 36168 - protein, 14 aa, BK virus
FLQKVKIKKVFVSK

SEQ ID NO: 36169 - protein, 14 aa, BK virus
LQKVKIKKVFVSKQ

SEQ ID NO: 36170 - protein, 14 aa, BK virus
NNIWQVLLGCTVCY

SEQ ID NO: 36171 - protein, 14 aa, BK virus
NIWQVLLGCTVCYL

SEQ ID NO: 36172 - protein, 14 aa, BK virus
IWQVLLGCTVCYLK

SEQ ID NO: 36173 - protein, 14 aa, BK virus
WQVLLGCTVCYLKW

SEQ ID NO: 36174 - protein, 14 aa, BK virus
QVLLGCTVCYLKWI

SEQ ID NO: 36175 - protein, 14 aa, BK virus
VLLGCTVCYLKWIL

SEQ ID NO: 36176 - protein, 14 aa, BK virus
YLIFCTVLFSMYLK

SEQ ID NO: 36177 - protein, 14 aa, BK virus
LIFCTVLFSMYLKE

SEQ ID NO: 36178 - protein, 14 aa, BK virus
IFCTVLFSMYLKED

SEQ ID NO: 36179 - protein, 14 aa, BK virus
FCTVLFSMYLKEDT

SEQ ID NO: 36180 - protein, 14 aa, BK virus
CTVLFSMYLKEDTG

SEQ ID NO: 36181 - protein, 14 aa, BK virus
TVLFSMYLKEDTGY

SEQ ID NO: 36182 - protein, 14 aa, BK virus
VLFSMYLKEDTGYL

SEQ ID NO: 36183 - protein, 14 aa, BK virus
LFSMYLKEDTGYLK

SEQ ID NO: 36184 - protein, 14 aa, BK virus
FSMYLKEDTGYLKV

SEQ ID NO: 36185 - protein, 14 aa, BK virus
SMYLKEDTGYLKVP

SEQ ID NO: 36186 - protein, 14 aa, BK virus
MYLKEDTGYLKVPL

SEQ ID NO: 36187 - protein, 14 aa, BK virus
YLKEDTGYLKVPLI

SEQ ID NO: 36188 - protein, 14 aa, BK virus
LKEDTGYLKVPLIV

SEQ ID NO: 36189 - protein, 14 aa, BK virus
KEDTGYLKVPLIVE

SEQ ID NO: 36190 - protein, 14 aa, BK virus
EDTGYLKVPLIVEK

SEQ ID NO: 36191 - protein, 14 aa, BK virus
DTGYLKVPLIVEKQ

SEQ ID NO: 36192 - protein, 14 aa, BK virus
TGYLKVPLIVEKQH

SEQ ID NO: 36193 - protein, 14 aa, BK virus
KGQELNQRICLQDM

SEQ ID NO: 36194 - protein, 14 aa, BK virus
GQELNQRICLQDME

SEQ ID NO: 36195 - protein, 14 aa, BK virus
ENPYKTQSSYLKKE

SEQ ID NO: 36196 - protein, 14 aa, BK virus
NPYKTQSSYLKKEF

SEQ ID NO: 36197 - protein, 14 aa, BK virus
PYKTQSSYLKKEFY

SEQ ID NO: 36198 - protein, 14 aa, BK virus
YKTQSSYLKKEFYK

SEQ ID NO: 36199 - protein, 14 aa, BK virus
KTQSSYLKKEFYKV

SEQ ID NO: 36200 - protein, 14 aa, BK virus
TQSSYLKKEFYKVE

SEQ ID NO: 36201 - protein, 14 aa, BK virus
LILQLIYNLELLNG

SEQ ID NO: 36202 - protein, 14 aa, BK virus
ILQLIYNLELLNGR

SEQ ID NO: 36203 - protein, 14 aa, BK virus
LQLIYNLELLNGRK

SEQ ID NO: 36204 - protein, 14 aa, BK virus
QLIYNLELLNGRKG

SEQ ID NO: 36205 - protein, 14 aa, BK virus
LIYNLELLNGRKGW

SEQ ID NO: 36206 - protein, 14 aa, BK virus
IYNLELLNGRKGWI

SEQ ID NO: 36207 - protein, 14 aa, BK virus
YNLELLNGRKGWIL

SEQ ID NO: 36208 - protein, 14 aa, BK virus
NLELLNGRKGWILR

SEQ ID NO: 36209 - protein, 14 aa, BK virus
NIIYAWGNVFLILQ

SEQ ID NO: 36210 - protein, 14 aa, BK virus
IIYAWGNVFLILQE

SEQ ID NO: 36211 - protein, 14 aa, BK virus
IYAWGNVFLILQEK

SEQ ID NO: 36212 - protein, 14 aa, BK virus
YAWGNVFLILQEKR

SEQ ID NO: 36213 - protein, 14 aa, BK virus
AWGNVFLILQEKRI

SEQ ID NO: 36214 - protein, 14 aa, BK virus
WGNVFLILQEKRIQ

SEQ ID NO: 36215 - protein, 14 aa, BK virus
GNVFLILQEKRIQK

SEQ ID NO: 36216 - protein, 14 aa, BK virus
NVFLILQEKRIQKL

SEQ ID NO: 36217 - protein, 14 aa, BK virus
VFLILQEKRIQKLK

SEQ ID NO: 36218 - protein, 14 aa, BK virus
FLILQEKRIQKLKT

SEQ ID NO: 36219 - protein, 14 aa, BK virus
LILQEKRIQKLKTL

SEQ ID NO: 36220 - protein, 14 aa, BK virus
ILQEKRIQKLKTLD

SEQ ID NO: 36221 - protein, 14 aa, BK virus
LQEKRIQKLKTLDM

SEQ ID NO: 36222 - protein, 14 aa, BK virus
QEKRIQKLKTLDMD

SEQ ID NO: 36223 - protein, 14 aa, BK virus
EKRIQKLKTLDMDQ

SEQ ID NO: 36224 - protein, 14 aa, BK virus
KRIQKLKTLDMDQA

SEQ ID NO: 36225 - protein, 14 aa, BK virus
RIQKLKTLDMDQAL

SEQ ID NO: 36226 - protein, 14 aa, BK virus
IQKLKTLDMDQALN

SEQ ID NO: 36227 - protein, 14 aa, BK virus
QKLKTLDMDQALNP

SEQ ID NO: 36228 - protein, 14 aa, BK virus
KLKTLDMDQALNPN

SEQ ID NO: 36229 - protein, 14 aa, BK virus
LKTLDMDQALNPNH

SEQ ID NO: 36230 - protein, 14 aa, BK virus
KTLDMDQALNPNHN

SEQ ID NO: 36231 - protein, 14 aa, BK virus
TLDMDQALNPNHNA

SEQ ID NO: 36232 - protein, 14 aa, BK virus
LDMDQALNPNHNAL

SEQ ID NO: 36233 - protein, 14 aa, BK virus
DMDQALNPNHNALP

SEQ ID NO: 36234 - protein, 14 aa, BK virus
MDQALNPNHNALPK

SEQ ID NO: 36235 - protein, 14 aa, BK virus
DQALNPNHNALPKS

SEQ ID NO: 36236 - protein, 14 aa, BK virus
QALNPNHNALPKSQ

SEQ ID NO: 36237 - protein, 14 aa, BK virus
ALNPNHNALPKSQI

SEQ ID NO: 36238 - protein, 14 aa, BK virus
LNPNHNALPKSQIL

SEQ ID NO: 36239 - protein, 14 aa, BK virus
NPNHNALPKSQILQ

SEQ ID NO: 36240 - protein, 14 aa, BK virus
PNHNALPKSQILQP

SEQ ID NO: 36241 - protein, 14 aa, BK virus
NHNALPKSQILQPL

SEQ ID NO: 36242 - protein, 14 aa, BK virus
HNALPKSQILQPLL

SEQ ID NO: 36243 - protein, 14 aa, BK virus
NALPKSQILQPLLK

SEQ ID NO: 36244 - protein, 14 aa, BK virus
ALPKSQILQPLLKI

SEQ ID NO: 36245 - protein, 14 aa, BK virus
LPKSQILQPLLKIP

SEQ ID NO: 36246 - protein, 14 aa, BK virus
PKSQILQPLLKIPK

SEQ ID NO: 36247 - protein, 14 aa, BK virus
KSQILQPLLKIPKG

SEQ ID NO: 36248 - protein, 14 aa, BK virus
SQILQPLLKIPKGQ

SEQ ID NO: 36249 - protein, 14 aa, BK virus
QILQPLLKIPKGQT

SEQ ID NO: 36250 - protein, 14 aa, BK virus
ILQPLLKIPKGQTP

SEQ ID NO: 36251 - protein, 14 aa, BK virus
LQPLLKIPKGQTPI

SEQ ID NO: 36252 - protein, 14 aa, BK virus
QPLLKIPKGQTPIV

SEQ ID NO: 36253 - protein, 14 aa, BK virus
PLLKIPKGQTPIVK

SEQ ID NO: 36254 - protein, 14 aa, BK virus
LLKIPKGQTPIVKS

SEQ ID NO: 36255 - protein, 14 aa, BK virus
LKIPKGQTPIVKSC

SEQ ID NO: 36256 - protein, 14 aa, BK virus
KIPKGQTPIVKSCI

SEQ ID NO: 36257 - protein, 14 aa, BK virus
IPKGQTPIVKSCIC

SEQ ID NO: 36258 - protein, 14 aa, BK virus
PKGQTPIVKSCICV

SEQ ID NO: 36259 - protein, 14 aa, BK virus
KGQTPIVKSCICVK

SEQ ID NO: 36260 - protein, 14 aa, BK virus
GQTPIVKSCICVKA

SEQ ID NO: 36261 - protein, 14 aa, BK virus
QTPIVKSCICVKAF

SEQ ID NO: 36262 - protein, 14 aa, BK virus
TPIVKSCICVKAFS

SEQ ID NO: 36263 - protein, 14 aa, BK virus
PIVKSCICVKAFSV

SEQ ID NO: 36264 - protein, 14 aa, BK virus
IVKSCICVKAFSVL

SEQ ID NO: 36265 - protein, 14 aa, BK virus
VKSCICVKAFSVLK

SEQ ID NO: 36266 - protein, 14 aa, BK virus
KSCICVKAFSVLKG

SEQ ID NO: 36267 - protein, 14 aa, BK virus
SCICVKAFSVLKGL

SEQ ID NO: 36268 - protein, 14 aa, BK virus
CICVKAFSVLKGLK

SEQ ID NO: 36269 - protein, 14 aa, BK virus
ICVKAFSVLKGLKH

SEQ ID NO: 36270 - protein, 14 aa, BK virus
CVKAFSVLKGLKHH

SEQ ID NO: 36271 - protein, 14 aa, BK virus
VKAFSVLKGLKHHP

SEQ ID NO: 36272 - protein, 14 aa, BK virus
KAFSVLKGLKHHPQ

SEQ ID NO: 36273 - protein, 14 aa, BK virus
AFSVLKGLKHHPQN

SEQ ID NO: 36274 - protein, 14 aa, BK virus
FSVLKGLKHHPQNN

SEQ ID NO: 36275 - protein, 14 aa, BK virus
SVLKGLKHHPQNNT

SEQ ID NO: 36276 - protein, 14 aa, BK virus
VLKGLKHHPQNNTS

SEQ ID NO: 36277 - protein, 14 aa, BK virus
LKGLKHHPQNNTSL

SEQ ID NO: 36278 - protein, 14 aa, BK virus
KGLKHHPQNNTSLK

SEQ ID NO: 36279 - protein, 14 aa, BK virus
GLKHHPQNNTSLKV

SEQ ID NO: 36280 - protein, 14 aa, BK virus
LKHHPQNNTSLKVA

SEQ ID NO: 36281 - protein, 14 aa, BK virus
KHHPQNNTSLKVAY

SEQ ID NO: 36282 - protein, 14 aa, BK virus
HHPQNNTSLKVAYT

SEQ ID NO: 36283 - protein, 14 aa, BK virus
HPQNNTSLKVAYTK

SEQ ID NO: 36284 - protein, 14 aa, BK virus
PQNNTSLKVAYTKA

SEQ ID NO: 36285 - protein, 14 aa, BK virus
QNNTSLKVAYTKAA

SEQ ID NO: 36286 - protein, 14 aa, BK virus
NNTSLKVAYTKAAF

SEQ ID NO: 36287 - protein, 14 aa, BK virus
NTSLKVAYTKAAFI

SEQ ID NO: 36288 - protein, 14 aa, BK virus
TSLKVAYTKAAFIK

SEQ ID NO: 36289 - protein, 14 aa, BK virus
SLKVAYTKAAFIKC

SEQ ID NO: 36290 - protein, 14 aa, BK virus
LKVAYTKAAFIKCI

SEQ ID NO: 36291 - protein, 14 aa, BK virus
KVAYTKAAFIKCIC

SEQ ID NO: 36292 - protein, 14 aa, BK virus
VAYTKAAFIKCICT

SEQ ID NO: 36293 - protein, 14 aa, BK virus
AYTKAAFIKCICTI

SEQ ID NO: 36294 - protein, 14 aa, BK virus
YTKAAFIKCICTIK

SEQ ID NO: 36295 - protein, 14 aa, BK virus
TKAAFIKCICTIKA

SEQ ID NO: 36296 - protein, 14 aa, BK virus
KAAFIKCICTIKAP

SEQ ID NO: 36297 - protein, 14 aa, BK virus
AAFIKCICTIKAPV

SEQ ID NO: 36298 - protein, 14 aa, BK virus
SILVCNCPCLSIYL

SEQ ID NO: 36299 - protein, 14 aa, BK virus
ILVCNCPCLSIYLI

SEQ ID NO: 36300 - protein, 14 aa, BK virus
LVCNCPCLSIYLII

SEQ ID NO: 36301 - protein, 14 aa, BK virus
VCNCPCLSIYLIIS

SEQ ID NO: 36302 - protein, 14 aa, BK virus
CNCPCLSIYLIISG

SEQ ID NO: 36303 - protein, 14 aa, BK virus
NCPCLSIYLIISGS

SEQ ID NO: 36304 - protein, 14 aa, BK virus
CPCLSIYLIISGSP

SEQ ID NO: 36305 - protein, 14 aa, BK virus
PCLSIYLIISGSPG

SEQ ID NO: 36306 - protein, 14 aa, BK virus
CLSIYLIISGSPGS

SEQ ID NO: 36307 - protein, 14 aa, BK virus
LSIYLIISGSPGSL

SEQ ID NO: 36308 - protein, 14 aa, BK virus
SIYLIISGSPGSLS

SEQ ID NO: 36309 - protein, 14 aa, BK virus
IYLIISGSPGSLSV

SEQ ID NO: 36310 - protein, 14 aa, BK virus
YLIISGSPGSLSVP

SEQ ID NO: 36311 - protein, 14 aa, BK virus
LIISGSPGSLSVPS

SEQ ID NO: 36312 - protein, 14 aa, BK virus
IISGSPGSLSVPSN

SEQ ID NO: 36313 - protein, 14 aa, BK virus
ISGSPGSLSVPSNT

SEQ ID NO: 36314 - protein, 14 aa, BK virus
SGSPGSLSVPSNTL

SEQ ID NO: 36315 - protein, 14 aa, BK virus
GSPGSLSVPSNTLT

SEQ ID NO: 36316 - protein, 14 aa, BK virus
SPGSLSVPSNTLTS

SEQ ID NO: 36317 - protein, 14 aa, BK virus
PGSLSVPSNTLTSS

SEQ ID NO: 36318 - protein, 14 aa, BK virus
GSLSVPSNTLTSST

SEQ ID NO: 36319 - protein, 14 aa, BK virus
SLSVPSNTLTSSTW

SEQ ID NO: 36320 - protein, 14 aa, BK virus
LSVPSNTLTSSTWD

SEQ ID NO: 36321 - protein, 14 aa, BK virus
SVPSNTLTSSTWDS

SEQ ID NO: 36322 - protein, 14 aa, BK virus
VPSNTLTSSTWDSI

SEQ ID NO: 36323 - protein, 14 aa, BK virus
PSNTLTSSTWDSIP

SEQ ID NO: 36324 - protein, 14 aa, BK virus
SNTLTSSTWDSIPY

SEQ ID NO: 36325 - protein, 14 aa, BK virus
NTLTSSTWDSIPYI

SEQ ID NO: 36326 - protein, 14 aa, BK virus
TLTSSTWDSIPYIG

SEQ ID NO: 36327 - protein, 14 aa, BK virus
LTSSTWDSIPYIGC

SEQ ID NO: 36328 - protein, 14 aa, BK virus
TSSTWDSIPYIGCP

SEQ ID NO: 36329 - protein, 14 aa, BK virus
SSTWDSIPYIGCPS

SEQ ID NO: 36330 - protein, 14 aa, BK virus
STWDSIPYIGCPST

SEQ ID NO: 36331 - protein, 14 aa, BK virus
TWDSIPYIGCPSTL

SEQ ID NO: 36332 - protein, 14 aa, BK virus
WDSIPYIGCPSTLW

SEQ ID NO: 36333 - protein, 14 aa, BK virus
DSIPYIGCPSTLWV

SEQ ID NO: 36334 - protein, 14 aa, BK virus
SIPYIGCPSTLWVL

SEQ ID NO: 36335 - protein, 14 aa, BK virus
IPYIGCPSTLWVLL

SEQ ID NO: 36336 - protein, 14 aa, BK virus
PYIGCPSTLWVLLF

SEQ ID NO: 36337 - protein, 14 aa, BK virus
YIGCPSTLWVLLFI

SEQ ID NO: 36338 - protein, 14 aa, BK virus
IGCPSTLWVLLFIR

SEQ ID NO: 36339 - protein, 14 aa, BK virus
GCPSTLWVLLFIRS

SEQ ID NO: 36340 - protein, 14 aa, BK virus
CPSTLWVLLFIRSL

SEQ ID NO: 36341 - protein, 14 aa, BK virus
PSTLWVLLFIRSLS

SEQ ID NO: 36342 - protein, 14 aa, BK virus
STLWVLLFIRSLSK

SEQ ID NO: 36343 - protein, 14 aa, BK virus
TLWVLLFIRSLSKK

SEQ ID NO: 36344 - protein, 14 aa, BK virus
LWVLLFIRSLSKKE

SEQ ID NO: 36345 - protein, 14 aa, BK virus
WVLLFIRSLSKKEI

SEQ ID NO: 36346 - protein, 14 aa, BK virus
VLLFIRSLSKKEIG

SEQ ID NO: 36347 - protein, 14 aa, BK virus
GFFTDLFLRRILKY

SEQ ID NO: 36348 - protein, 14 aa, BK virus
FFTDLFLRRILKYL

SEQ ID NO: 36349 - protein, 14 aa, BK virus
FTDLFLRRILKYLA

SEQ ID NO: 36350 - protein, 14 aa, BK virus
TDLFLRRILKYLAR

SEQ ID NO: 36351 - protein, 14 aa, BK virus
DLFLRRILKYLARP

SEQ ID NO: 36352 - protein, 14 aa, BK virus
LFLRRILKYLARPL

SEQ ID NO: 36353 - protein, 14 aa, BK virus
FLRRILKYLARPLH

SEQ ID NO: 36354 - protein, 14 aa, BK virus
LRRILKYLARPLHC

SEQ ID NO: 36355 - protein, 14 aa, BK virus
RRILKYLARPLHCC

SEQ ID NO: 36356 - protein, 14 aa, BK virus
RILKYLARPLHCCV

SEQ ID NO: 36357 - protein, 14 aa, BK virus
ILKYLARPLHCCVP

SEQ ID NO: 36358 - protein, 14 aa, BK virus
LKYLARPLHCCVPE

SEQ ID NO: 36359 - protein, 14 aa, BK virus
KYLARPLHCCVPEL

SEQ ID NO: 36360 - protein, 14 aa, BK virus
YLARPLHCCVPELL

SEQ ID NO: 36361 - protein, 14 aa, BK virus
LARPLHCCVPELLV

SEQ ID NO: 36362 - protein, 14 aa, BK virus
ARPLHCCVPELLVN

SEQ ID NO: 36363 - protein, 14 aa, BK virus
RPLHCCVPELLVNR

SEQ ID NO: 36364 - protein, 14 aa, BK virus
PLHCCVPELLVNRP

SEQ ID NO: 36365 - protein, 14 aa, BK virus
LHCCVPELLVNRPQ

SEQ ID NO: 36366 - protein, 14 aa, BK virus
HCCVPELLVNRPQI

SEQ ID NO: 36367 - protein, 14 aa, BK virus
CCVPELLVNRPQIS

SEQ ID NO: 36368 - protein, 14 aa, BK virus
CVPELLVNRPQISA

SEQ ID NO: 36369 - protein, 14 aa, BK virus
VPELLVNRPQISAA

SEQ ID NO: 36370 - protein, 14 aa, BK virus
PELLVNRPQISAAE

SEQ ID NO: 36371 - protein, 14 aa, BK virus
ELLVNRPQISAAET

SEQ ID NO: 36372 - protein, 14 aa, BK virus
LLVNRPQISAAETY

SEQ ID NO: 36373 - protein, 14 aa, BK virus
LVNRPQISAAETYR

SEQ ID NO: 36374 - protein, 14 aa, BK virus
VNRPQISAAETYRL

SEQ ID NO: 36375 - protein, 14 aa, BK virus
NRPQISAAETYRLS

SEQ ID NO: 36376 - protein, 14 aa, BK virus
RPQISAAETYRLSA

SEQ ID NO: 36377 - protein, 14 aa, BK virus
PQISAAETYRLSAL

SEQ ID NO: 36378 - protein, 14 aa, BK virus
QISAAETYRLSALQ

SEQ ID NO: 36379 - protein, 14 aa, BK virus
ISAAETYRLSALQR

SEQ ID NO: 36380 - protein, 14 aa, BK virus
SAAETYRLSALQRG

SEQ ID NO: 36381 - protein, 14 aa, BK virus
AAETYRLSALQRGP

SEQ ID NO: 36382 - protein, 14 aa, BK virus
AETYRLSALQRGPT

SEQ ID NO: 36383 - protein, 14 aa, BK virus
ETYRLSALQRGPTP

SEQ ID NO: 36384 - protein, 14 aa, BK virus
TYRLSALQRGPTPC

SEQ ID NO: 36385 - protein, 14 aa, BK virus
YRLSALQRGPTPCS

SEQ ID NO: 36386 - protein, 14 aa, BK virus
RLSALQRGPTPCSS

SEQ ID NO: 36387 - protein, 14 aa, BK virus
LSALQRGPTPCSSS

SEQ ID NO: 36388 - protein, 14 aa, BK virus
SALQRGPTPCSSSN

SEQ ID NO: 36389 - protein, 14 aa, BK virus
ALQRGPTPCSSSNT

SEQ ID NO: 36390 - protein, 14 aa, BK virus
LQRGPTPCSSSNTV

SEQ ID NO: 36391 - protein, 14 aa, BK virus
QRGPTPCSSSNTVV

SEQ ID NO: 36392 - protein, 14 aa, BK virus
RGPTPCSSSNTVVA

SEQ ID NO: 36393 - protein, 14 aa, BK virus
GPTPCSSSNTVVAV

SEQ ID NO: 36394 - protein, 14 aa, BK virus
PTPCSSSNTVVAVL

SEQ ID NO: 36395 - protein, 14 aa, BK virus
TPCSSSNTVVAVLV

SEQ ID NO: 36396 - protein, 14 aa, BK virus
PCSSSNTVVAVLVT

SEQ ID NO: 36397 - protein, 14 aa, BK virus
STGGTFSPPVKVPK

SEQ ID NO: 36398 - protein, 14 aa, BK virus
TGGTFSPPVKVPKY

SEQ ID NO: 36399 - protein, 14 aa, BK virus
GGTFSPPVKVPKYL

SEQ ID NO: 36400 - protein, 14 aa, BK virus
GTFSPPVKVPKYLA

SEQ ID NO: 36401 - protein, 14 aa, BK virus
TFSPPVKVPKYLAF

SEQ ID NO: 36402 - protein, 14 aa, BK virus
FSPPVKVPKYLAFS

SEQ ID NO: 36403 - protein, 14 aa, BK virus
SPPVKVPKYLAFSF

SEQ ID NO: 36404 - protein, 14 aa, BK virus
PPVKVPKYLAFSFL

SEQ ID NO: 36405 - protein, 14 aa, BK virus
PVKVPKYLAFSFLL

SEQ ID NO: 36406 - protein, 14 aa, BK virus
VKVPKYLAFSFLLG

SEQ ID NO: 36407 - protein, 14 aa, BK virus
KVPKYLAFSFLLGS

SEQ ID NO: 36408 - protein, 14 aa, BK virus
VPKYLAFSFLLGSG

SEQ ID NO: 36409 - protein, 14 aa, BK virus
PKYLAFSFLLGSGT

SEQ ID NO: 36410 - protein, 14 aa, BK virus
KYLAFSFLLGSGTQ

SEQ ID NO: 36411 - protein, 14 aa, BK virus
YLAFSFLLGSGTQH

SEQ ID NO: 36412 - protein, 14 aa, BK virus
LAFSFLLGSGTQHS

SEQ ID NO: 36413 - protein, 14 aa, BK virus
AFSFLLGSGTQHST

SEQ ID NO: 36414 - protein, 14 aa, BK virus
FSFLLGSGTQHSTG

SEQ ID NO: 36415 - protein, 14 aa, BK virus
ALWSVFITWDWAVG

SEQ ID NO: 36416 - protein, 14 aa, BK virus
LWSVFITWDWAVGF

SEQ ID NO: 36417 - protein, 14 aa, BK virus
WSVFITWDWAVGFL

SEQ ID NO: 36418 - protein, 14 aa, BK virus
SVFITWDWAVGFLG

SEQ ID NO: 36419 - protein, 14 aa, BK virus
VFITWDWAVGFLGV

SEQ ID NO: 36420 - protein, 14 aa, BK virus
FITWDWAVGFLGVI

SEQ ID NO: 36421 - protein, 14 aa, BK virus
ITWDWAVGFLGVIV

SEQ ID NO: 36422 - protein, 14 aa, BK virus
TWDWAVGFLGVIVP

SEQ ID NO: 36423 - protein, 14 aa, BK virus
WDWAVGFLGVIVPS

SEQ ID NO: 36424 - protein, 14 aa, BK virus
DWAVGFLGVIVPSG

SEQ ID NO: 36425 - protein, 14 aa, BK virus
WAVGFLGVIVPSGY

SEQ ID NO: 36426 - protein, 14 aa, BK virus
AVGFLGVIVPSGYF

SEQ ID NO: 36427 - protein, 14 aa, BK virus
VGFLGVIVPSGYFD

SEQ ID NO: 36428 - protein, 14 aa, BK virus
GFLGVIVPSGYFDL

SEQ ID NO: 36429 - protein, 14 aa, BK virus
FISTPCISKGSPPT

SEQ ID NO: 36430 - protein, 14 aa, BK virus
ISTPCISKGSPPTA

SEQ ID NO: 36431 - protein, 14 aa, BK virus
STPCISKGSPPTAK

SEQ ID NO: 36432 - protein, 14 aa, BK virus
TPCISKGSPPTAKK

SEQ ID NO: 36433 - protein, 14 aa, BK virus
PCISKGSPPTAKKW

SEQ ID NO: 36434 - protein, 14 aa, BK virus
CISKGSPPTAKKWK

SEQ ID NO: 36435 - protein, 14 aa, BK virus
ISKGSPPTAKKWKL

SEQ ID NO: 36436 - protein, 14 aa, BK virus
SKGSPPTAKKWKLL

SEQ ID NO: 36437 - protein, 14 aa, BK virus
KGSPPTAKKWKLLP

SEQ ID NO: 36438 - protein, 14 aa, BK virus
IGFPPPCSCTFCDP

SEQ ID NO: 36439 - protein, 14 aa, BK virus
GFPPPCSCTFCDPA

SEQ ID NO: 36440 - protein, 14 aa, BK virus
RLSMLVIPITSVCT

SEQ ID NO: 36441 - protein, 14 aa, BK virus
LSMLVIPITSVCTV

SEQ ID NO: 36442 - protein, 14 aa, BK virus
SMLVIPITSVCTVT

SEQ ID NO: 36443 - protein, 14 aa, BK virus
MLVIPITSVCTVTA

SEQ ID NO: 36444 - protein, 14 aa, BK virus
LVIPITSVCTVTAS

SEQ ID NO: 36445 - protein, 14 aa, BK virus
VIPITSVCTVTASH

SEQ ID NO: 36446 - protein, 14 aa, BK virus
IPITSVCTVTASHI

SEQ ID NO: 36447 - protein, 14 aa, BK virus
PITSVCTVTASHIS

SEQ ID NO: 36448 - protein, 14 aa, BK virus
ITSVCTVTASHISR

SEQ ID NO: 36449 - protein, 14 aa, BK virus
TSVCTVTASHISRF

SEQ ID NO: 36450 - protein, 14 aa, BK virus
SVCTVTASHISRFP

SEQ ID NO: 36451 - protein, 14 aa, BK virus
VCTVTASHISRFPQ

SEQ ID NO: 36452 - protein, 14 aa, BK virus
CTVTASHISRFPQV

SEQ ID NO: 36453 - protein, 14 aa, BK virus
TVTASHISRFPQVR

SEQ ID NO: 36454 - protein, 14 aa, BK virus
VTASHISRFPQVRS

SEQ ID NO: 36455 - protein, 14 aa, BK virus
TASHISRFPQVRSS

SEQ ID NO: 36456 - protein, 14 aa, BK virus
ASHISRFPQVRSSF

SEQ ID NO: 36457 - protein, 14 aa, BK virus
SHISRFPQVRSSFK

SEQ ID NO: 36458 - protein, 14 aa, BK virus
HISRFPQVRSSFKL

SEQ ID NO: 36459 - protein, 14 aa, BK virus
ISRFPQVRSSFKLG

SEQ ID NO: 36460 - protein, 14 aa, BK virus
SRFPQVRSSFKLGR

SEQ ID NO: 36461 - protein, 14 aa, BK virus
RFPQVRSSFKLGRG

SEQ ID NO: 36462 - protein, 14 aa, BK virus
FPQVRSSFKLGRGI

SEQ ID NO: 36463 - protein, 14 aa, BK virus
PQVRSSFKLGRGIL

SEQ ID NO: 36464 - protein, 14 aa, BK virus
QVRSSFKLGRGILA

SEQ ID NO: 36465 - protein, 14 aa, BK virus
VRSSFKLGRGILAV

SEQ ID NO: 36466 - protein, 14 aa, BK virus
RSSFKLGRGILAVL

SEQ ID NO: 36467 - protein, 14 aa, BK virus
QGSIFLSGLSLLKS

SEQ ID NO: 36468 - protein, 14 aa, BK virus
GSIFLSGLSLLKSF

SEQ ID NO: 36469 - protein, 14 aa, BK virus
SIFLSGLSLLKSFS

SEQ ID NO: 36470 - protein, 14 aa, BK virus
IFLSGLSLLKSFSA

SEQ ID NO: 36471 - protein, 14 aa, BK virus
FLSGLSLLKSFSAL

SEQ ID NO: 36472 - protein, 14 aa, BK virus
LSGLSLLKSFSALS

SEQ ID NO: 36473 - protein, 14 aa, BK virus
SGLSLLKSFSALSF

SEQ ID NO: 36474 - protein, 14 aa, BK virus
GLSLLKSFSALSFR

SEQ ID NO: 36475 - protein, 14 aa, BK virus
LSLLKSFSALSFRL

SEQ ID NO: 36476 - protein, 14 aa, BK virus
SLLKSFSALSFRLK

SEQ ID NO: 36477 - protein, 14 aa, BK virus
LLKSFSALSFRLKP

SEQ ID NO: 36478 - protein, 14 aa, BK virus
LKSFSALSFRLKPL

SEQ ID NO: 36479 - protein, 14 aa, BK virus
KSFSALSFRLKPLR

SEQ ID NO: 36480 - protein, 14 aa, BK virus
SFSALSFRLKPLRF

SEQ ID NO: 36481 - protein, 14 aa, BK virus
FSALSFRLKPLRFS

SEQ ID NO: 36482 - protein, 14 aa, BK virus
SALSFRLKPLRFSS

SEQ ID NO: 36483 - protein, 14 aa, BK virus
ALSFRLKPLRFSSG

SEQ ID NO: 36484 - protein, 14 aa, BK virus
LSFRLKPLRFSSGS

SEQ ID NO: 36485 - protein, 14 aa, BK virus
SFRLKPLRFSSGSP

SEQ ID NO: 36486 - protein, 14 aa, BK virus
FRLKPLRFSSGSPI

SEQ ID NO: 36487 - protein, 14 aa, BK virus
RLKPLRFSSGSPIS

SEQ ID NO: 36488 - protein, 14 aa, BK virus
LKPLRFSSGSPISG

SEQ ID NO: 36489 - protein, 14 aa, BK virus
KPLRFSSGSPISGF

SEQ ID NO: 36490 - protein, 14 aa, BK virus
PLRFSSGSPISGFR

SEQ ID NO: 36491 - protein, 14 aa, BK virus
LRFSSGSPISGFRK

SEQ ID NO: 36492 - protein, 14 aa, BK virus
RFSSGSPISGFRKH

SEQ ID NO: 36493 - protein, 14 aa, BK virus
FSSGSPISGFRKHS

SEQ ID NO: 36494 - protein, 14 aa, BK virus
SSGSPISGFRKHST

SEQ ID NO: 36495 - protein, 14 aa, BK virus
SGSPISGFRKHSTS

SEQ ID NO: 36496 - protein, 14 aa, BK virus
GSPISGFRKHSTSV

SEQ ID NO: 36497 - protein, 14 aa, BK virus
SPISGFRKHSTSVI

SEQ ID NO: 36498 - protein, 14 aa, BK virus
PISGFRKHSTSVIA

SEQ ID NO: 36499 - protein, 14 aa, BK virus
ISGFRKHSTSVIAS

SEQ ID NO: 36500 - protein, 14 aa, BK virus
SGFRKHSTSVIAST

SEQ ID NO: 36501 - protein, 14 aa, BK virus
GFRKHSTSVIASTP

SEQ ID NO: 36502 - protein, 14 aa, BK virus
FRKHSTSVIASTPV

SEQ ID NO: 36503 - protein, 14 aa, BK virus
RKHSTSVIASTPVL

SEQ ID NO: 36504 - protein, 14 aa, BK virus
KHSTSVIASTPVLT

SEQ ID NO: 36505 - protein, 14 aa, BK virus
HSTSVIASTPVLTS

SEQ ID NO: 36506 - protein, 14 aa, BK virus
STSVIASTPVLTSR

SEQ ID NO: 36507 - protein, 14 aa, BK virus
TSVIASTPVLTSRT

SEQ ID NO: 36508 - protein, 14 aa, BK virus
SVIASTPVLTSRTS

SEQ ID NO: 36509 - protein, 14 aa, BK virus
VIASTPVLTSRTST

SEQ ID NO: 36510 - protein, 14 aa, BK virus
IASTPVLTSRTSTP

SEQ ID NO: 36511 - protein, 14 aa, BK virus
ASTPVLTSRTSTPP

SEQ ID NO: 36512 - protein, 14 aa, BK virus
STPVLTSRTSTPPF

SEQ ID NO: 36513 - protein, 14 aa, BK virus
TPVLTSRTSTPPFI

SEQ ID NO: 36514 - protein, 14 aa, BK virus
PVLTSRTSTPPFIS

SEQ ID NO: 36515 - protein, 14 aa, BK virus
VLTSRTSTPPFISS

SEQ ID NO: 36516 - protein, 14 aa, BK virus
LTSRTSTPPFISSF

SEQ ID NO: 36517 - protein, 14 aa, BK virus
TSRTSTPPFISSFG

SEQ ID NO: 36518 - protein, 14 aa, BK virus
SRTSTPPFISSFGT

SEQ ID NO: 36519 - protein, 14 aa, BK virus
RTSTPPFISSFGTC

SEQ ID NO: 36520 - protein, 14 aa, BK virus
TSTPPFISSFGTCT

SEQ ID NO: 36521 - protein, 14 aa, BK virus
STPPFISSFGTCTG

SEQ ID NO: 36522 - protein, 14 aa, BK virus
TPPFISSFGTCTGS

SEQ ID NO: 36523 - protein, 14 aa, BK virus
PPFISSFGTCTGSF

SEQ ID NO: 36524 - protein, 14 aa, BK virus
PFISSFGTCTGSFG

SEQ ID NO: 36525 - protein, 14 aa, BK virus
FISSFGTCTGSFGF

SEQ ID NO: 36526 - protein, 14 aa, BK virus
ISSFGTCTGSFGFL

SEQ ID NO: 36527 - protein, 14 aa, BK virus
SSFGTCTGSFGFLG

SEQ ID NO: 36528 - protein, 14 aa, BK virus
SFGTCTGSFGFLGA

SEQ ID NO: 36529 - protein, 14 aa, BK virus
FGTCTGSFGFLGAA

SEQ ID NO: 36530 - protein, 14 aa, BK virus
GTCTGSFGFLGAAP

SEQ ID NO: 36531 - protein, 14 aa, BK virus
TCTGSFGFLGAAPG

SEQ ID NO: 36532 - protein, 14 aa, BK virus
CTGSFGFLGAAPGH

SEQ ID NO: 36533 - protein, 14 aa, BK virus
TGSFGFLGAAPGHS

SEQ ID NO: 36534 - protein, 14 aa, BK virus
GSFGFLGAAPGHSP

SEQ ID NO: 36535 - protein, 14 aa, BK virus
SFGFLGAAPGHSPF

SEQ ID NO: 36536 - protein, 14 aa, BK virus
FGFLGAAPGHSPFL

SEQ ID NO: 36537 - protein, 14 aa, BK virus
GFLGAAPGHSPFLL

SEQ ID NO: 36538 - protein, 14 aa, BK virus
FLGAAPGHSPFLLV

SEQ ID NO: 36539 - protein, 14 aa, BK virus
LGAAPGHSPFLLVG

SEQ ID NO: 36540 - protein, 14 aa, BK virus
GAAPGHSPFLLVGA

SEQ ID NO: 36541 - protein, 14 aa, BK virus
AAPGHSPFLLVGAI

SEQ ID NO: 36542 - protein, 14 aa, BK virus
APGHSPFLLVGAIF

SEQ ID NO: 36543 - protein, 14 aa, BK virus
PGHSPFLLVGAIFI

SEQ ID NO: 36544 - protein, 14 aa, BK virus
GHSPFLLVGAIFIC

SEQ ID NO: 36545 - protein, 14 aa, BK virus
HSPFLLVGAIFICF

SEQ ID NO: 36546 - protein, 14 aa, BK virus
SPFLLVGAIFICFK

SEQ ID NO: 36547 - protein, 14 aa, BK virus
PFLLVGAIFICFKS

SEQ ID NO: 36548 - protein, 14 aa, BK virus
FLLVGAIFICFKSR

SEQ ID NO: 36549 - protein, 14 aa, BK virus
LLVGAIFICFKSRC

SEQ ID NO: 36550 - protein, 14 aa, BK virus
LVGAIFICFKSRCY

SEQ ID NO: 36551 - protein, 14 aa, BK virus
VGAIFICFKSRCYS

SEQ ID NO: 36552 - protein, 14 aa, BK virus
GAIFICFKSRCYSP

SEQ ID NO: 36553 - protein, 14 aa, BK virus
AIFICFKSRCYSPV

SEQ ID NO: 36554 - protein, 14 aa, BK virus
IFICFKSRCYSPVQ

SEQ ID NO: 36555 - protein, 14 aa, BK virus
FICFKSRCYSPVQA

SEQ ID NO: 36556 - protein, 14 aa, BK virus
RQHPLRSSSLISTS

SEQ ID NO: 36557 - protein, 14 aa, BK virus
QHPLRSSSLISTSW

SEQ ID NO: 36558 - protein, 14 aa, BK virus
HPLRSSSLISTSWG

SEQ ID NO: 36559 - protein, 14 aa, BK virus
PLRSSSLISTSWGN

SEQ ID NO: 36560 - protein, 14 aa, BK virus
LRSSSLISTSWGNS

SEQ ID NO: 36561 - protein, 14 aa, BK virus
RSSSLISTSWGNSF

SEQ ID NO: 36562 - protein, 14 aa, BK virus
SSSLISTSWGNSFF

SEQ ID NO: 36563 - protein, 14 aa, BK virus
SSLISTSWGNSFFY

SEQ ID NO: 36564 - protein, 14 aa, BK virus
SLISTSWGNSFFYK

SEQ ID NO: 36565 - protein, 14 aa, BK virus
LISTSWGNSFFYKL

SEQ ID NO: 36566 - protein, 14 aa, BK virus
ISTSWGNSFFYKLS

SEQ ID NO: 36567 - protein, 14 aa, BK virus
VHSLCNFFYTVSII

SEQ ID NO: 36568 - protein, 14 aa, BK virus
HSLCNFFYTVSIIY

SEQ ID NO: 36569 - protein, 14 aa, BK virus
SLCNFFYTVSIIYT

SEQ ID NO: 36570 - protein, 14 aa, BK virus
LCNFFYTVSIIYTI

SEQ ID NO: 36571 - protein, 14 aa, BK virus
CNFFYTVSIIYTIS

SEQ ID NO: 36572 - protein, 14 aa, BK virus
NFFYTVSIIYTISM

SEQ ID NO: 36573 - protein, 14 aa, BK virus
FFYTVSIIYTISMA

SEQ ID NO: 36574 - protein, 14 aa, BK virus
FYTVSIIYTISMAK

SEQ ID NO: 36575 - protein, 14 aa, BK virus
YTVSIIYTISMAKM

SEQ ID NO: 36576 - protein, 14 aa, BK virus
TVSIIYTISMAKMY

SEQ ID NO: 36577 - protein, 14 aa, BK virus
VSIIYTISMAKMYT

SEQ ID NO: 36578 - protein, 14 aa, BK virus
SIIYTISMAKMYTG

SEQ ID NO: 36579 - protein, 14 aa, BK virus
IIYTISMAKMYTGT

SEQ ID NO: 36580 - protein, 14 aa, BK virus
IYTISMAKMYTGTF

SEQ ID NO: 36581 - protein, 14 aa, BK virus
YTISMAKMYTGTFP

SEQ ID NO: 36582 - protein, 14 aa, BK virus
TISMAKMYTGTFPF

SEQ ID NO: 36583 - protein, 14 aa, BK virus
ISMAKMYTGTFPFS

SEQ ID NO: 36584 - protein, 14 aa, BK virus
SMAKMYTGTFPFSY

SEQ ID NO: 36585 - protein, 14 aa, BK virus
MAKMYTGTFPFSYL

SEQ ID NO: 36586 - protein, 14 aa, BK virus
AKMYTGTFPFSYLS

SEQ ID NO: 36587 - protein, 14 aa, BK virus
KMYTGTFPFSYLSN

SEQ ID NO: 36588 - protein, 14 aa, BK virus
MYTGTFPFSYLSNH

SEQ ID NO: 36589 - protein, 14 aa, BK virus
GPNRGKIRIILLNI

SEQ ID NO: 36590 - protein, 14 aa, BK virus
PNRGKIRIILLNII

SEQ ID NO: 36591 - protein, 14 aa, BK virus
NRGKIRIILLNIII

SEQ ID NO: 36592 - protein, 14 aa, BK virus
RGKIRIILLNIIIK

SEQ ID NO: 36593 - protein, 14 aa, BK virus
GKIRIILLNIIIKV

SEQ ID NO: 36594 - protein, 14 aa, BK virus
KIRIILLNIIIKVY

SEQ ID NO: 36595 - protein, 14 aa, BK virus
IRIILLNIIIKVYR

SEQ ID NO: 36596 - protein, 14 aa, BK virus
RIILLNIIIKVYRG

SEQ ID NO: 36597 - protein, 14 aa, BK virus
IILLNIIIKVYRGI

SEQ ID NO: 36598 - protein, 14 aa, BK virus
ILLNIIIKVYRGIY

SEQ ID NO: 36599 - protein, 14 aa, BK virus
LLNIIIKVYRGIYN

SEQ ID NO: 36600 - protein, 14 aa, BK virus
LNIIIKVYRGIYNC

SEQ ID NO: 36601 - protein, 14 aa, BK virus
NIIIKVYRGIYNCP

SEQ ID NO: 36602 - protein, 14 aa, BK virus
IIIKVYRGIYNCPG

SEQ ID NO: 36603 - protein, 14 aa, BK virus
IIKVYRGIYNCPGS

SEQ ID NO: 36604 - protein, 14 aa, BK virus
IKVYRGIYNCPGSF

SEQ ID NO: 36605 - protein, 14 aa, BK virus
KVYRGIYNCPGSFL

SEQ ID NO: 36606 - protein, 14 aa, BK virus
VYRGIYNCPGSFLQ

SEQ ID NO: 36607 - protein, 14 aa, BK virus
YRGIYNCPGSFLQK

SEQ ID NO: 36608 - protein, 14 aa, BK virus
RGIYNCPGSFLQKS

SEQ ID NO: 36609 - protein, 14 aa, BK virus
GIYNCPGSFLQKSS

SEQ ID NO: 36610 - protein, 14 aa, BK virus
IYNCPGSFLQKSSQ

SEQ ID NO: 36611 - protein, 14 aa, BK virus
YNCPGSFLQKSSQG

SEQ ID NO: 36612 - protein, 14 aa, BK virus
NCPGSFLQKSSQGV

SEQ ID NO: 36613 - protein, 14 aa, BK virus
CPGSFLQKSSQGVS

SEQ ID NO: 36614 - protein, 14 aa, BK virus
PGSFLQKSSQGVSK

SEQ ID NO: 36615 - protein, 14 aa, BK virus
GSFLQKSSQGVSKK

SEQ ID NO: 36616 - protein, 14 aa, BK virus
SFLQKSSQGVSKKS

SEQ ID NO: 36617 - protein, 14 aa, BK virus
FLQKSSQGVSKKSF

SEQ ID NO: 36618 - protein, 14 aa, BK virus
LQKSSQGVSKKSFC

SEQ ID NO: 36619 - protein, 14 aa, BK virus
QKSSQGVSKKSFCS

SEQ ID NO: 36620 - protein, 14 aa, BK virus
KSSQGVSKKSFCSS

SEQ ID NO: 36621 - protein, 14 aa, BK virus
SSQGVSKKSFCSSL

SEQ ID NO: 36622 - protein, 14 aa, BK virus
SQGVSKKSFCSSLQ

SEQ ID NO: 36623 - protein, 14 aa, BK virus
QGVSKKSFCSSLQF

SEQ ID NO: 36624 - protein, 14 aa, BK virus
GVSKKSFCSSLQFL

SEQ ID NO: 36625 - protein, 14 aa, BK virus
GYRRYIIPNNMPQS

SEQ ID NO: 36626 - protein, 14 aa, BK virus
YRRYIIPNNMPQSL

SEQ ID NO: 36627 - protein, 14 aa, BK virus
RRYIIPNNMPQSLG

SEQ ID NO: 36628 - protein, 14 aa, BK virus
RYIIPNNMPQSLGN

SEQ ID NO: 36629 - protein, 14 aa, BK virus
YIIPNNMPQSLGNS

SEQ ID NO: 36630 - protein, 14 aa, BK virus
IIPNNMPQSLGNSS

SEQ ID NO: 36631 - protein, 14 aa, BK virus
IPNNMPQSLGNSSK

SEQ ID NO: 36632 - protein, 14 aa, BK virus
PNNMPQSLGNSSKQ

SEQ ID NO: 36633 - protein, 14 aa, BK virus
NNMPQSLGNSSKQR

SEQ ID NO: 36634 - protein, 14 aa, BK virus
NMPQSLGNSSKQRR

SEQ ID NO: 36635 - protein, 14 aa, BK virus
MPQSLGNSSKQRRT

SEQ ID NO: 36636 - protein, 14 aa, BK virus
PQSLGNSSKQRRTP

SEQ ID NO: 36637 - protein, 14 aa, BK virus
QSLGNSSKQRRTPM

SEQ ID NO: 36638 - protein, 14 aa, BK virus
SLGNSSKQRRTPMP

SEQ ID NO: 36639 - protein, 14 aa, BK virus
LGNSSKQRRTPMPR

SEQ ID NO: 36640 - protein, 14 aa, BK virus
GNSSKQRRTPMPRI

SEQ ID NO: 36641 - protein, 14 aa, BK virus
NSSKQRRTPMPRIK

SEQ ID NO: 36642 - protein, 14 aa, BK virus
SSKQRRTPMPRIKV

SEQ ID NO: 36643 - protein, 14 aa, BK virus
SKQRRTPMPRIKVL

SEQ ID NO: 36644 - protein, 14 aa, BK virus
KQRRTPMPRIKVLN

SEQ ID NO: 36645 - protein, 14 aa, BK virus
QRRTPMPRIKVLNI

SEQ ID NO: 36646 - protein, 14 aa, BK virus
RRTPMPRIKVLNII

SEQ ID NO: 36647 - protein, 14 aa, BK virus
RTPMPRIKVLNIIN

SEQ ID NO: 36648 - protein, 14 aa, BK virus
TPMPRIKVLNIINK

SEQ ID NO: 36649 - protein, 14 aa, BK virus
PMPRIKVLNIINKS

SEQ ID NO: 36650 - protein, 14 aa, BK virus
MPRIKVLNIINKSI

SEQ ID NO: 36651 - protein, 14 aa, BK virus
PRIKVLNIINKSIY

SEQ ID NO: 36652 - protein, 14 aa, BK virus
RIKVLNIINKSIYT

SEQ ID NO: 36653 - protein, 14 aa, BK virus
IKVLNIINKSIYTR

SEQ ID NO: 36654 - protein, 14 aa, BK virus
KVLNIINKSIYTRK

SEQ ID NO: 36655 - protein, 14 aa, BK virus
VLNIINKSIYTRKQ

SEQ ID NO: 36656 - protein, 14 aa, BK virus
LNIINKSIYTRKQN

SEQ ID NO: 36657 - protein, 14 aa, BK virus
NIINKSIYTRKQNI

SEQ ID NO: 36658 - protein, 14 aa, BK virus
IINKSIYTRKQNII

SEQ ID NO: 36659 - protein, 14 aa, BK virus
INKSIYTRKQNIIV

SEQ ID NO: 36660 - protein, 14 aa, BK virus
NKSIYTRKQNIIVL

SEQ ID NO: 36661 - protein, 14 aa, BK virus
KSIYTRKQNIIVLI

SEQ ID NO: 36662 - protein, 14 aa, BK virus
SIYTRKQNIIVLIW

SEQ ID NO: 36663 - protein, 14 aa, BK virus
IYTRKQNIIVLIWV

SEQ ID NO: 36664 - protein, 14 aa, BK virus
YTRKQNIIVLIWVK

SEQ ID NO: 36665 - protein, 14 aa, BK virus
TRKQNIIVLIWVKQ

SEQ ID NO: 36666 - protein, 14 aa, BK virus
RKQNIIVLIWVKQF

SEQ ID NO: 36667 - protein, 14 aa, BK virus
KQNIIVLIWVKQFQ

SEQ ID NO: 36668 - protein, 14 aa, BK virus
QNIIVLIWVKQFQS

SEQ ID NO: 36669 - protein, 14 aa, BK virus
NIIVLIWVKQFQSH

SEQ ID NO: 36670 - protein, 14 aa, BK virus
IIVLIWVKQFQSHA

SEQ ID NO: 36671 - protein, 14 aa, BK virus
LLIEAYSGNFVIPI

SEQ ID NO: 36672 - protein, 14 aa, BK virus
LIEAYSGNFVIPII

SEQ ID NO: 36673 - protein, 14 aa, BK virus
IEAYSGNFVIPIIK

SEQ ID NO: 36674 - protein, 14 aa, BK virus
EAYSGNFVIPIIKE

SEQ ID NO: 36675 - protein, 14 aa, BK virus
AYSGNFVIPIIKEL

SEQ ID NO: 36676 - protein, 14 aa, BK virus
YSGNFVIPIIKELI

SEQ ID NO: 36677 - protein, 14 aa, BK virus
SGNFVIPIIKELIP

SEQ ID NO: 36678 - protein, 14 aa, BK virus
GNFVIPIIKELIPY

SEQ ID NO: 36679 - protein, 14 aa, BK virus
NFVIPIIKELIPYL

SEQ ID NO: 36680 - protein, 14 aa, BK virus
FVIPIIKELIPYLS

SEQ ID NO: 36681 - protein, 14 aa, BK virus
SSKPSNSPRSTSNY

SEQ ID NO: 36682 - protein, 14 aa, BK virus
SKPSNSPRSTSNYS

SEQ ID NO: 36683 - protein, 14 aa, BK virus
KPSNSPRSTSNYSI

SEQ ID NO: 36684 - protein, 14 aa, BK virus
PSNSPRSTSNYSIC

SEQ ID NO: 36685 - protein, 14 aa, BK virus
SNSPRSTSNYSICL

SEQ ID NO: 36686 - protein, 14 aa, BK virus
NSPRSTSNYSICLR

SEQ ID NO: 36687 - protein, 14 aa, BK virus
SPRSTSNYSICLRS

SEQ ID NO: 36688 - protein, 14 aa, BK virus
GTCYALYSSKGCNL

SEQ ID NO: 36689 - protein, 14 aa, BK virus
TCYALYSSKGCNLN

SEQ ID NO: 36690 - protein, 14 aa, BK virus
CYALYSSKGCNLNF

SEQ ID NO: 36691 - protein, 14 aa, BK virus
YALYSSKGCNLNFY

SEQ ID NO: 36692 - protein, 14 aa, BK virus
ALYSSKGCNLNFYS

SEQ ID NO: 36693 - protein, 14 aa, BK virus
LYSSKGCNLNFYSS

SEQ ID NO: 36694 - protein, 14 aa, BK virus
YSSKGCNLNFYSSS

SEQ ID NO: 36695 - protein, 14 aa, BK virus
SSKGCNLNFYSSSS

SEQ ID NO: 36696 - protein, 14 aa, BK virus
SKGCNLNFYSSSSL

SEQ ID NO: 36697 - protein, 14 aa, BK virus
KGCNLNFYSSSSLP

SEQ ID NO: 36698 - protein, 14 aa, BK virus
GCNLNFYSSSSLPS

SEQ ID NO: 36699 - protein, 14 aa, BK virus
CNLNFYSSSSLPSS

SEQ ID NO: 36700 - protein, 14 aa, BK virus
NLNFYSSSSLPSSN

SEQ ID NO: 36701 - protein, 14 aa, BK virus
LNFYSSSSLPSSNF

SEQ ID NO: 36702 - protein, 14 aa, BK virus
NFYSSSSLPSSNFS

SEQ ID NO: 36703 - protein, 14 aa, BK virus
FYSSSSLPSSNFSH

SEQ ID NO: 36704 - protein, 14 aa, BK virus
SSTHEPGNTKKKGL

SEQ ID NO: 36705 - protein, 14 aa, BK virus
STHEPGNTKKKGLL

SEQ ID NO: 36706 - protein, 14 aa, BK virus
THEPGNTKKKGLLT

SEQ ID NO: 36707 - protein, 14 aa, BK virus
ESFTESFTAGKAVV

SEQ ID NO: 36708 - protein, 14 aa, BK virus
SFTESFTAGKAVVL

SEQ ID NO: 36709 - protein, 14 aa, BK virus
FTESFTAGKAVVLL

SEQ ID NO: 36710 - protein, 14 aa, BK virus
TESFTAGKAVVLLF

SEQ ID NO: 36711 - protein, 14 aa, BK virus
ESFTAGKAVVLLFF

SEQ ID NO: 36712 - protein, 14 aa, BK virus
SFTAGKAVVLLFFP

SEQ ID NO: 36713 - protein, 14 aa, BK virus
FTAGKAVVLLFFPS

SEQ ID NO: 36714 - protein, 14 aa, BK virus
TAGKAVVLLFFPST

SEQ ID NO: 36715 - protein, 14 aa, BK virus
AGKAVVLLFFPSTL

SEQ ID NO: 36716 - protein, 14 aa, BK virus
GKAVVLLFFPSTLS

SEQ ID NO: 36717 - protein, 14 aa, BK virus
KAVVLLFFPSTLSS

SEQ ID NO: 36718 - protein, 14 aa, BK virus
AVVLLFFPSTLSSP

SEQ ID NO: 36719 - protein, 14 aa, BK virus
VVLLFFPSTLSSPL

SEQ ID NO: 36720 - protein, 14 aa, BK virus
VLLFFPSTLSSPLQ

SEQ ID NO: 36721 - protein, 14 aa, BK virus
LLFFPSTLSSPLQN

SEQ ID NO: 36722 - protein, 14 aa, BK virus
LFFPSTLSSPLQNS

SEQ ID NO: 36723 - protein, 14 aa, BK virus
FFPSTLSSPLQNSS

SEQ ID NO: 36724 - protein, 14 aa, BK virus
FPSTLSSPLQNSSK

SEQ ID NO: 36725 - protein, 14 aa, BK virus
PSTLSSPLQNSSKS

SEQ ID NO: 36726 - protein, 14 aa, BK virus
STLSSPLQNSSKSS

SEQ ID NO: 36727 - protein, 14 aa, BK virus
TLSSPLQNSSKSSK

SEQ ID NO: 36728 - protein, 14 aa, BK virus
LSSPLQNSSKSSKI

SEQ ID NO: 36729 - protein, 14 aa, BK virus
SSPLQNSSKSSKIK

SEQ ID NO: 36730 - protein, 14 aa, BK virus
SPLQNSSKSSKIKI

SEQ ID NO: 36731 - protein, 14 aa, BK virus
PLQNSSKSSKIKIK

SEQ ID NO: 36732 - protein, 14 aa, BK virus
LQNSSKSSKIKIKI

SEQ ID NO: 36733 - protein, 14 aa, BK virus
QNSSKSSKIKIKIL

SEQ ID NO: 36734 - protein, 14 aa, BK virus
ALFFVPVQVLPTFT

SEQ ID NO: 36735 - protein, 14 aa, BK virus
LFFVPVQVLPTFTE

SEQ ID NO: 36736 - protein, 14 aa, BK virus
FFVPVQVLPTFTEA

SEQ ID NO: 36737 - protein, 14 aa, BK virus
FVPVQVLPTFTEAC

SEQ ID NO: 36738 - protein, 14 aa, BK virus
VPVQVLPTFTEACR

SEQ ID NO: 36739 - protein, 14 aa, BK virus
PVQVLPTFTEACRD

SEQ ID NO: 36740 - protein, 14 aa, BK virus
VQVLPTFTEACRDS

SEQ ID NO: 36741 - protein, 14 aa, BK virus
QVLPTFTEACRDSW

SEQ ID NO: 36742 - protein, 14 aa, BK virus
VLPTFTEACRDSWR

SEQ ID NO: 36743 - protein, 14 aa, BK virus
LPTFTEACRDSWRR

SEQ ID NO: 36744 - protein, 14 aa, BK virus
PTFTEACRDSWRRT

SEQ ID NO: 36745 - protein, 14 aa, BK virus
TFTEACRDSWRRTM

SEQ ID NO: 36746 - protein, 14 aa, BK virus
FTEACRDSWRRTMA

SEQ ID NO: 36747 - protein, 14 aa, BK virus
TEACRDSWRRTMAF

SEQ ID NO: 36748 - protein, 14 aa, BK virus
EACRDSWRRTMAFV

SEQ ID NO: 36749 - protein, 14 aa, BK virus
ACRDSWRRTMAFVQ

SEQ ID NO: 36750 - protein, 14 aa, BK virus
CRDSWRRTMAFVQF

SEQ ID NO: 36751 - protein, 14 aa, BK virus
RDSWRRTMAFVQFN

SEQ ID NO: 36752 - protein, 14 aa, BK virus
DSWRRTMAFVQFNW

SEQ ID NO: 36753 - protein, 14 aa, BK virus
SWRRTMAFVQFNWG

SEQ ID NO: 36754 - protein, 14 aa, BK virus
WRRTMAFVQFNWGQ

SEQ ID NO: 36755 - protein, 14 aa, BK virus
RRTMAFVQFNWGQG

SEQ ID NO: 36756 - protein, 14 aa, BK virus
RTMAFVQFNWGQGQ

SEQ ID NO: 36757 - protein, 14 aa, BK virus
TMAFVQFNWGQGQD

SEQ ID NO: 36758 - protein, 14 aa, BK virus
MAFVQFNWGQGQDS

SEQ ID NO: 36759 - protein, 14 aa, BK virus
ARKTCLSCTFLPEV

SEQ ID NO: 36760 - protein, 14 aa, BK virus
RKTCLSCTFLPEVM

SEQ ID NO: 36761 - protein, 14 aa, BK virus
KTCLSCTFLPEVMV

SEQ ID NO: 36762 - protein, 14 aa, BK virus
TCLSCTFLPEVMVW

SEQ ID NO: 36763 - protein, 14 aa, BK virus
CLSCTFLPEVMVWL

SEQ ID NO: 36764 - protein, 14 aa, BK virus
LSCTFLPEVMVWLH

SEQ ID NO: 36765 - protein, 14 aa, BK virus
SCTFLPEVMVWLHS

SEQ ID NO: 36766 - protein, 14 aa, BK virus
CTFLPEVMVWLHSM

SEQ ID NO: 36767 - protein, 14 aa, BK virus
TFLPEVMVWLHSMG

SEQ ID NO: 36768 - protein, 14 aa, BK virus
FLPEVMVWLHSMGK

SEQ ID NO: 36769 - protein, 14 aa, BK virus
LPEVMVWLHSMGKQ

SEQ ID NO: 36770 - protein, 14 aa, BK virus
PEVMVWLHSMGKQL

SEQ ID NO: 36771 - protein, 14 aa, BK virus
EVMVWLHSMGKQLL

SEQ ID NO: 36772 - protein, 14 aa, BK virus
VMVWLHSMGKQLLP

SEQ ID NO: 36773 - protein, 14 aa, BK virus
MVWLHSMGKQLLPV

SEQ ID NO: 36774 - protein, 14 aa, BK virus
VWLHSMGKQLLPVS

SEQ ID NO: 36775 - protein, 14 aa, BK virus
WLHSMGKQLLPVSH

SEQ ID NO: 36776 - protein, 14 aa, BK virus
LHSMGKQLLPVSHA

SEQ ID NO: 36777 - protein, 14 aa, BK virus
HSMGKQLLPVSHAL

SEQ ID NO: 36778 - protein, 14 aa, BK virus
SMGKQLLPVSHALS

SEQ ID NO: 36779 - protein, 14 aa, BK virus
MGKQLLPVSHALSF

SEQ ID NO: 36780 - protein, 14 aa, BK virus
GKQLLPVSHALSFL

SEQ ID NO: 36781 - protein, 14 aa, BK virus
KQLLPVSHALSFLR

SEQ ID NO: 36782 - protein, 14 aa, BK virus
QLLPVSHALSFLRS

SEQ ID NO: 36783 - protein, 14 aa, BK virus
LLPVSHALSFLRSW

SEQ ID NO: 36784 - protein, 14 aa, BK virus
LPVSHALSFLRSWF

SEQ ID NO: 36785 - protein, 14 aa, BK virus
PVSHALSFLRSWFG

SEQ ID NO: 36786 - protein, 14 aa, BK virus
VSHALSFLRSWFGC

SEQ ID NO: 36787 - protein, 14 aa, BK virus
SHALSFLRSWFGCI

SEQ ID NO: 36788 - protein, 14 aa, BK virus
HALSFLRSWFGCIP

SEQ ID NO: 36789 - protein, 14 aa, BK virus
ALSFLRSWFGCIPL

SEQ ID NO: 36790 - protein, 14 aa, BK virus
GLAKLFGEIPILLQ

SEQ ID NO: 36791 - protein, 14 aa, BK virus
LAKLFGEIPILLQF

SEQ ID NO: 36792 - protein, 14 aa, BK virus
AKLFGEIPILLQFL

SEQ ID NO: 36793 - protein, 14 aa, BK virus
KLFGEIPILLQFLQ

SEQ ID NO: 36794 - protein, 15 aa, BK virus
MDKVLNREESMELMD

SEQ ID NO: 36795 - protein, 15 aa, BK virus
DKVLNREESMELMDL

SEQ ID NO: 36796 - protein, 15 aa, BK virus
KVLNREESMELMDLL

SEQ ID NO: 36797 - protein, 15 aa, BK virus
VLNREESMELMDLLG

SEQ ID NO: 36798 - protein, 15 aa, BK virus
LNREESMELMDLLGL

SEQ ID NO: 36799 - protein, 15 aa, BK virus
NREESMELMDLLGLE

SEQ ID NO: 36800 - protein, 15 aa, BK virus
REESMELMDLLGLER

SEQ ID NO: 36801 - protein, 15 aa, BK virus
EESMELMDLLGLERA

SEQ ID NO: 36802 - protein, 15 aa, BK virus
ESMELMDLLGLERAA

SEQ ID NO: 36803 - protein, 15 aa, BK virus
SMELMDLLGLERAAW

SEQ ID NO: 36804 - protein, 15 aa, BK virus
MELMDLLGLERAAWG

SEQ ID NO: 36805 - protein, 15 aa, BK virus
ELMDLLGLERAAWGN

SEQ ID NO: 36806 - protein, 15 aa, BK virus
LMDLLGLERAAWGNL

SEQ ID NO: 36807 - protein, 15 aa, BK virus
MDLLGLERAAWGNLP

SEQ ID NO: 36808 - protein, 15 aa, BK virus
DLLGLERAAWGNLPL

SEQ ID NO: 36809 - protein, 15 aa, BK virus
LLGLERAAWGNLPLM

SEQ ID NO: 36810 - protein, 15 aa, BK virus
LGLERAAWGNLPLMR

SEQ ID NO: 36811 - protein, 15 aa, BK virus
GLERAAWGNLPLMRK

SEQ ID NO: 36812 - protein, 15 aa, BK virus
LERAAWGNLPLMRKA

SEQ ID NO: 36813 - protein, 15 aa, BK virus
ERAAWGNLPLMRKAY

SEQ ID NO: 36814 - protein, 15 aa, BK virus
RAAWGNLPLMRKAYL

SEQ ID NO: 36815 - protein, 15 aa, BK virus
AAWGNLPLMRKAYLR

SEQ ID NO: 36816 - protein, 15 aa, BK virus
AWGNLPLMRKAYLRK

SEQ ID NO: 36817 - protein, 15 aa, BK virus
WGNLPLMRKAYLRKC

SEQ ID NO: 36818 - protein, 15 aa, BK virus
GNLPLMRKAYLRKCK

SEQ ID NO: 36819 - protein, 15 aa, BK virus
NLPLMRKAYLRKCKE

SEQ ID NO: 36820 - protein, 15 aa, BK virus
LPLMRKAYLRKCKEF

SEQ ID NO: 36821 - protein, 15 aa, BK virus
PLMRKAYLRKCKEFH

SEQ ID NO: 36822 - protein, 15 aa, BK virus
LMRKAYLRKCKEFHP

SEQ ID NO: 36823 - protein, 15 aa, BK virus
MRKAYLRKCKEFHPD

SEQ ID NO: 36824 - protein, 15 aa, BK virus
RKAYLRKCKEFHPDK

SEQ ID NO: 36825 - protein, 15 aa, BK virus
KAYLRKCKEFHPDKG

SEQ ID NO: 36826 - protein, 15 aa, BK virus
AYLRKCKEFHPDKGG

SEQ ID NO: 36827 - protein, 15 aa, BK virus
YLRKCKEFHPDKGGD

SEQ ID NO: 36828 - protein, 15 aa, BK virus
LRKCKEFHPDKGGDE

SEQ ID NO: 36829 - protein, 15 aa, BK virus
RKCKEFHPDKGGDED

SEQ ID NO: 36830 - protein, 15 aa, BK virus
KCKEFHPDKGGDEDK

SEQ ID NO: 36831 - protein, 15 aa, BK virus
CKEFHPDKGGDEDKM

SEQ ID NO: 36832 - protein, 15 aa, BK virus
KEFHPDKGGDEDKMK

SEQ ID NO: 36833 - protein, 15 aa, BK virus
EFHPDKGGDEDKMKR

SEQ ID NO: 36834 - protein, 15 aa, BK virus
FHPDKGGDEDKMKRM

SEQ ID NO: 36835 - protein, 15 aa, BK virus
HPDKGGDEDKMKRMN

SEQ ID NO: 36836 - protein, 15 aa, BK virus
PDKGGDEDKMKRMNT

SEQ ID NO: 36837 - protein, 15 aa, BK virus
DKGGDEDKMKRMNTL

SEQ ID NO: 36838 - protein, 15 aa, BK virus
KGGDEDKMKRMNTLY

SEQ ID NO: 36839 - protein, 15 aa, BK virus
GGDEDKMKRMNTLYK

SEQ ID NO: 36840 - protein, 15 aa, BK virus
GDEDKMKRMNTLYKK

SEQ ID NO: 36841 - protein, 15 aa, BK virus
DEDKMKRMNTLYKKM

SEQ ID NO: 36842 - protein, 15 aa, BK virus
EDKMKRMNTLYKKME

SEQ ID NO: 36843 - protein, 15 aa, BK virus
DKMKRMNTLYKKMEQ

SEQ ID NO: 36844 - protein, 15 aa, BK virus
KMKRMNTLYKKMEQD

SEQ ID NO: 36845 - protein, 15 aa, BK virus
MKRMNTLYKKMEQDV

SEQ ID NO: 36846 - protein, 15 aa, BK virus
KRMNTLYKKMEQDVK

SEQ ID NO: 36847 - protein, 15 aa, BK virus
RMNTLYKKMEQDVKV

SEQ ID NO: 36848 - protein, 15 aa, BK virus
MNTLYKKMEQDVKVA

SEQ ID NO: 36849 - protein, 15 aa, BK virus
NTLYKKMEQDVKVAH

SEQ ID NO: 36850 - protein, 15 aa, BK virus
TLYKKMEQDVKVAHQ

SEQ ID NO: 36851 - protein, 15 aa, BK virus
LYKKMEQDVKVAHQP

SEQ ID NO: 36852 - protein, 15 aa, BK virus
YKKMEQDVKVAHQPD

SEQ ID NO: 36853 - protein, 15 aa, BK virus
KKMEQDVKVAHQPDF

SEQ ID NO: 36854 - protein, 15 aa, BK virus
KMEQDVKVAHQPDFG

SEQ ID NO: 36855 - protein, 15 aa, BK virus
MEQDVKVAHQPDFGT

SEQ ID NO: 36856 - protein, 15 aa, BK virus
EQDVKVAHQPDFGTW

SEQ ID NO: 36857 - protein, 15 aa, BK virus
QDVKVAHQPDFGTWS

SEQ ID NO: 36858 - protein, 15 aa, BK virus
DVKVAHQPDFGTWSS

SEQ ID NO: 36859 - protein, 15 aa, BK virus
VKVAHQPDFGTWSSS

SEQ ID NO: 36860 - protein, 15 aa, BK virus
KVAHQPDFGTWSSSE

SEQ ID NO: 36861 - protein, 15 aa, BK virus
VAHQPDFGTWSSSEV

SEQ ID NO: 36862 - protein, 15 aa, BK virus
AHQPDFGTWSSSEVC

SEQ ID NO: 36863 - protein, 15 aa, BK virus
HQPDFGTWSSSEVCA

SEQ ID NO: 36864 - protein, 15 aa, BK virus
QPDFGTWSSSEVCAD

SEQ ID NO: 36865 - protein, 15 aa, BK virus
PDFGTWSSSEVCADF

SEQ ID NO: 36866 - protein, 15 aa, BK virus
DFGTWSSSEVCADFP

SEQ ID NO: 36867 - protein, 15 aa, BK virus
FGTWSSSEVCADFPL

SEQ ID NO: 36868 - protein, 15 aa, BK virus
GTWSSSEVCADFPLC

SEQ ID NO: 36869 - protein, 15 aa, BK virus
TWSSSEVCADFPLCP

SEQ ID NO: 36870 - protein, 15 aa, BK virus
WSSSEVCADFPLCPD

SEQ ID NO: 36871 - protein, 15 aa, BK virus
SSSEVCADFPLCPDT

SEQ ID NO: 36872 - protein, 15 aa, BK virus
SSEVCADFPLCPDTL

SEQ ID NO: 36873 - protein, 15 aa, BK virus
SEVCADFPLCPDTLY

SEQ ID NO: 36874 - protein, 15 aa, BK virus
EVCADFPLCPDTLYC

SEQ ID NO: 36875 - protein, 15 aa, BK virus
VCADFPLCPDTLYCK

SEQ ID NO: 36876 - protein, 15 aa, BK virus
CADFPLCPDTLYCKE

SEQ ID NO: 36877 - protein, 15 aa, BK virus
ADFPLCPDTLYCKEW

SEQ ID NO: 36878 - protein, 15 aa, BK virus
DFPLCPDTLYCKEWP

SEQ ID NO: 36879 - protein, 15 aa, BK virus
FPLCPDTLYCKEWPI

SEQ ID NO: 36880 - protein, 15 aa, BK virus
PLCPDTLYCKEWPIC

SEQ ID NO: 36881 - protein, 15 aa, BK virus
LCPDTLYCKEWPICS

SEQ ID NO: 36882 - protein, 15 aa, BK virus
CPDTLYCKEWPICSK

SEQ ID NO: 36883 - protein, 15 aa, BK virus
PDTLYCKEWPICSKK

SEQ ID NO: 36884 - protein, 15 aa, BK virus
DTLYCKEWPICSKKP

SEQ ID NO: 36885 - protein, 15 aa, BK virus
TLYCKEWPICSKKPS

SEQ ID NO: 36886 - protein, 15 aa, BK virus
LYCKEWPICSKKPSV

SEQ ID NO: 36887 - protein, 15 aa, BK virus
YCKEWPICSKKPSVH

SEQ ID NO: 36888 - protein, 15 aa, BK virus
CKEWPICSKKPSVHC

SEQ ID NO: 36889 - protein, 15 aa, BK virus
KEWPICSKKPSVHCP

SEQ ID NO: 36890 - protein, 15 aa, BK virus
EWPICSKKPSVHCPC

SEQ ID NO: 36891 - protein, 15 aa, BK virus
WPICSKKPSVHCPCM

SEQ ID NO: 36892 - protein, 15 aa, BK virus
PICSKKPSVHCPCML

SEQ ID NO: 36893 - protein, 15 aa, BK virus
ICSKKPSVHCPCMLC

SEQ ID NO: 36894 - protein, 15 aa, BK virus
CSKKPSVHCPCMLCQ

SEQ ID NO: 36895 - protein, 15 aa, BK virus
SKKPSVHCPCMLCQL

SEQ ID NO: 36896 - protein, 15 aa, BK virus
KKPSVHCPCMLCQLR

SEQ ID NO: 36897 - protein, 15 aa, BK virus
KPSVHCPCMLCQLRL

SEQ ID NO: 36898 - protein, 15 aa, BK virus
PSVHCPCMLCQLRLR

SEQ ID NO: 36899 - protein, 15 aa, BK virus
SVHCPCMLCQLRLRH

SEQ ID NO: 36900 - protein, 15 aa, BK virus
VHCPCMLCQLRLRHL

SEQ ID NO: 36901 - protein, 15 aa, BK virus
HCPCMLCQLRLRHLN

SEQ ID NO: 36902 - protein, 15 aa, BK virus
CPCMLCQLRLRHLNR

SEQ ID NO: 36903 - protein, 15 aa, BK virus
PCMLCQLRLRHLNRK

SEQ ID NO: 36904 - protein, 15 aa, BK virus
CMLCQLRLRHLNRKF

SEQ ID NO: 36905 - protein, 15 aa, BK virus
MLCQLRLRHLNRKFL

SEQ ID NO: 36906 - protein, 15 aa, BK virus
LCQLRLRHLNRKFLR

SEQ ID NO: 36907 - protein, 15 aa, BK virus
CQLRLRHLNRKFLRK

SEQ ID NO: 36908 - protein, 15 aa, BK virus
QLRLRHLNRKFLRKE

SEQ ID NO: 36909 - protein, 15 aa, BK virus
LRLRHLNRKFLRKEP

SEQ ID NO: 36910 - protein, 15 aa, BK virus
RLRHLNRKFLRKEPL

SEQ ID NO: 36911 - protein, 15 aa, BK virus
LRHLNRKFLRKEPLV

SEQ ID NO: 36912 - protein, 15 aa, BK virus
RHLNRKFLRKEPLVW

SEQ ID NO: 36913 - protein, 15 aa, BK virus
HLNRKFLRKEPLVWI

SEQ ID NO: 36914 - protein, 15 aa, BK virus
LNRKFLRKEPLVWID

SEQ ID NO: 36915 - protein, 15 aa, BK virus
NRKFLRKEPLVWIDC

SEQ ID NO: 36916 - protein, 15 aa, BK virus
RKFLRKEPLVWIDCY

SEQ ID NO: 36917 - protein, 15 aa, BK virus
KFLRKEPLVWIDCYC

SEQ ID NO: 36918 - protein, 15 aa, BK virus
FLRKEPLVWIDCYCI

SEQ ID NO: 36919 - protein, 15 aa, BK virus
LRKEPLVWIDCYCID

SEQ ID NO: 36920 - protein, 15 aa, BK virus
RKEPLVWIDCYCIDC

SEQ ID NO: 36921 - protein, 15 aa, BK virus
KEPLVWIDCYCIDCF

SEQ ID NO: 36922 - protein, 15 aa, BK virus
EPLVWIDCYCIDCFT

SEQ ID NO: 36923 - protein, 15 aa, BK virus
PLVWIDCYCIDCFTQ

SEQ ID NO: 36924 - protein, 15 aa, BK virus
LVWIDCYCIDCFTQW

SEQ ID NO: 36925 - protein, 15 aa, BK virus
VWIDCYCIDCFTQWF

SEQ ID NO: 36926 - protein, 15 aa, BK virus
WIDCYCIDCFTQWFG

SEQ ID NO: 36927 - protein, 15 aa, BK virus
IDCYCIDCFTQWFGL

SEQ ID NO: 36928 - protein, 15 aa, BK virus
DCYCIDCFTQWFGLD

SEQ ID NO: 36929 - protein, 15 aa, BK virus
CYCIDCFTQWFGLDL

SEQ ID NO: 36930 - protein, 15 aa, BK virus
YCIDCFTQWFGLDLT

SEQ ID NO: 36931 - protein, 15 aa, BK virus
CIDCFTQWFGLDLTE

SEQ ID NO: 36932 - protein, 15 aa, BK virus
IDCFTQWFGLDLTEE

SEQ ID NO: 36933 - protein, 15 aa, BK virus
DCFTQWFGLDLTEET

SEQ ID NO: 36934 - protein, 15 aa, BK virus
CFTQWFGLDLTEETL

SEQ ID NO: 36935 - protein, 15 aa, BK virus
FTQWFGLDLTEETLQ

SEQ ID NO: 36936 - protein, 15 aa, BK virus
TQWFGLDLTEETLQW

SEQ ID NO: 36937 - protein, 15 aa, BK virus
QWFGLDLTEETLQWW

SEQ ID NO: 36938 - protein, 15 aa, BK virus
WFGLDLTEETLQWWV

SEQ ID NO: 36939 - protein, 15 aa, BK virus
FGLDLTEETLQWWVQ

SEQ ID NO: 36940 - protein, 15 aa, BK virus
GLDLTEETLQWWVQI

SEQ ID NO: 36941 - protein, 15 aa, BK virus
LDLTEETLQWWVQII

SEQ ID NO: 36942 - protein, 15 aa, BK virus
DLTEETLQWWVQIIG

SEQ ID NO: 36943 - protein, 15 aa, BK virus
LTEETLQWWVQIIGE

SEQ ID NO: 36944 - protein, 15 aa, BK virus
TEETLQWWVQIIGET

SEQ ID NO: 36945 - protein, 15 aa, BK virus
EETLQWWVQIIGETP

SEQ ID NO: 36946 - protein, 15 aa, BK virus
ETLQWWVQIIGETPF

SEQ ID NO: 36947 - protein, 15 aa, BK virus
TLQWWVQIIGETPFR

SEQ ID NO: 36948 - protein, 15 aa, BK virus
LQWWVQIIGETPFRD

SEQ ID NO: 36949 - protein, 15 aa, BK virus
QWWVQIIGETPFRDL

SEQ ID NO: 36950 - protein, 15 aa, BK virus
WWVQIIGETPFRDLK

SEQ ID NO: 36951 - protein, 15 aa, BK virus
WVQIIGETPFRDLKL

SEQ ID NO: 36952 - protein, 15 aa, BK virus
KALSNYFFYRCQPME

SEQ ID NO: 36953 - protein, 15 aa, BK virus
ALSNYFFYRCQPMEQ

SEQ ID NO: 36954 - protein, 15 aa, BK virus
LSNYFFYRCQPMEQK

SEQ ID NO: 36955 - protein, 15 aa, BK virus
SNYFFYRCQPMEQKS

SEQ ID NO: 36956 - protein, 15 aa, BK virus
NYFFYRCQPMEQKSG

SEQ ID NO: 36957 - protein, 15 aa, BK virus
YFFYRCQPMEQKSGS

SEQ ID NO: 36958 - protein, 15 aa, BK virus
FFYRCQPMEQKSGSP

SEQ ID NO: 36959 - protein, 15 aa, BK virus
FYRCQPMEQKSGSPG

SEQ ID NO: 36960 - protein, 15 aa, BK virus
YRCQPMEQKSGSPGG

SEQ ID NO: 36961 - protein, 15 aa, BK virus
RCQPMEQKSGSPGGV

SEQ ID NO: 36962 - protein, 15 aa, BK virus
CQPMEQKSGSPGGVP

SEQ ID NO: 36963 - protein, 15 aa, BK virus
QPMEQKSGSPGGVPL

SEQ ID NO: 36964 - protein, 15 aa, BK virus
PMEQKSGSPGGVPLM

SEQ ID NO: 36965 - protein, 15 aa, BK virus
MEQKSGSPGGVPLMK

SEQ ID NO: 36966 - protein, 15 aa, BK virus
EQKSGSPGGVPLMKN

SEQ ID NO: 36967 - protein, 15 aa, BK virus
QKSGSPGGVPLMKNG

SEQ ID NO: 36968 - protein, 15 aa, BK virus
KSGSPGGVPLMKNGM

SEQ ID NO: 36969 - protein, 15 aa, BK virus
SGSPGGVPLMKNGMK

SEQ ID NO: 36970 - protein, 15 aa, BK virus
GSPGGVPLMKNGMKI

SEQ ID NO: 36971 - protein, 15 aa, BK virus
SPGGVPLMKNGMKIY

SEQ ID NO: 36972 - protein, 15 aa, BK virus
PGGVPLMKNGMKIYF

SEQ ID NO: 36973 - protein, 15 aa, BK virus
GGVPLMKNGMKIYFA

SEQ ID NO: 36974 - protein, 15 aa, BK virus
GVPLMKNGMKIYFAM

SEQ ID NO: 36975 - protein, 15 aa, BK virus
VPLMKNGMKIYFAMK

SEQ ID NO: 36976 - protein, 15 aa, BK virus
PLMKNGMKIYFAMKI

SEQ ID NO: 36977 - protein, 15 aa, BK virus
LMKNGMKIYFAMKIC

SEQ ID NO: 36978 - protein, 15 aa, BK virus
MKNGMKIYFAMKICL

SEQ ID NO: 36979 - protein, 15 aa, BK virus
KNGMKIYFAMKICLP

SEQ ID NO: 36980 - protein, 15 aa, BK virus
NGMKIYFAMKICLPV

SEQ ID NO: 36981 - protein, 15 aa, BK virus
GMKIYFAMKICLPVM

SEQ ID NO: 36982 - protein, 15 aa, BK virus
MKIYFAMKICLPVMK

SEQ ID NO: 36983 - protein, 15 aa, BK virus
KIYFAMKICLPVMKK

SEQ ID NO: 36984 - protein, 15 aa, BK virus
IYFAMKICLPVMKKQ

SEQ ID NO: 36985 - protein, 15 aa, BK virus
YFAMKICLPVMKKQQ

SEQ ID NO: 36986 - protein, 15 aa, BK virus
FAMKICLPVMKKQQQ

SEQ ID NO: 36987 - protein, 15 aa, BK virus
AMKICLPVMKKQQQI

SEQ ID NO: 36988 - protein, 15 aa, BK virus
MKICLPVMKKQQQIL

SEQ ID NO: 36989 - protein, 15 aa, BK virus
KICLPVMKKQQQILN

SEQ ID NO: 36990 - protein, 15 aa, BK virus
ICLPVMKKQQQILNT

SEQ ID NO: 36991 - protein, 15 aa, BK virus
CLPVMKKQQQILNTQ

SEQ ID NO: 36992 - protein, 15 aa, BK virus
LPVMKKQQQILNTQH

SEQ ID NO: 36993 - protein, 15 aa, BK virus
PVMKKQQQILNTQHH

SEQ ID NO: 36994 - protein, 15 aa, BK virus
VMKKQQQILNTQHHP

SEQ ID NO: 36995 - protein, 15 aa, BK virus
MKKQQQILNTQHHPK

SEQ ID NO: 36996 - protein, 15 aa, BK virus
KKQQQILNTQHHPKK

SEQ ID NO: 36997 - protein, 15 aa, BK virus
KQQQILNTQHHPKKK

SEQ ID NO: 36998 - protein, 15 aa, BK virus
QQQILNTQHHPKKKE

SEQ ID NO: 36999 - protein, 15 aa, BK virus
QQILNTQHHPKKKER

SEQ ID NO: 37000 - protein, 15 aa, BK virus
KTLKTFPLIYTSFLV

SEQ ID NO: 37001 - protein, 15 aa, BK virus
TLKTFPLIYTSFLVK

SEQ ID NO: 37002 - protein, 15 aa, BK virus
LKTFPLIYTSFLVKL

SEQ ID NO: 37003 - protein, 15 aa, BK virus
KTFPLIYTSFLVKLY

SEQ ID NO: 37004 - protein, 15 aa, BK virus
TFPLIYTSFLVKLYL

SEQ ID NO: 37005 - protein, 15 aa, BK virus
FPLIYTSFLVKLYLV

SEQ ID NO: 37006 - protein, 15 aa, BK virus
PLIYTSFLVKLYLVI

SEQ ID NO: 37007 - protein, 15 aa, BK virus
LIYTSFLVKLYLVIE

SEQ ID NO: 37008 - protein, 15 aa, BK virus
IYTSFLVKLYLVIEP

SEQ ID NO: 37009 - protein, 15 aa, BK virus
YTSFLVKLYLVIEPL

SEQ ID NO: 37010 - protein, 15 aa, BK virus
TSFLVKLYLVIEPLP

SEQ ID NO: 37011 - protein, 15 aa, BK virus
SFLVKLYLVIEPLPA

SEQ ID NO: 37012 - protein, 15 aa, BK virus
FLVKLYLVIEPLPAL

SEQ ID NO: 37013 - protein, 15 aa, BK virus
LVKLYLVIEPLPALL

SEQ ID NO: 37014 - protein, 15 aa, BK virus
VKLYLVIEPLPALLC

SEQ ID NO: 37015 - protein, 15 aa, BK virus
KLYLVIEPLPALLCI

SEQ ID NO: 37016 - protein, 15 aa, BK virus
LYLVIEPLPALLCIL

SEQ ID NO: 37017 - protein, 15 aa, BK virus
YLVIEPLPALLCILL

SEQ ID NO: 37018 - protein, 15 aa, BK virus
LVIEPLPALLCILLK

SEQ ID NO: 37019 - protein, 15 aa, BK virus
VIEPLPALLCILLKK

SEQ ID NO: 37020 - protein, 15 aa, BK virus
IEPLPALLCILLKKK

SEQ ID NO: 37021 - protein, 15 aa, BK virus
EPLPALLCILLKKKL

SEQ ID NO: 37022 - protein, 15 aa, BK virus
PLPALLCILLKKKLK

SEQ ID NO: 37023 - protein, 15 aa, BK virus
LPALLCILLKKKLKF

SEQ ID NO: 37024 - protein, 15 aa, BK virus
PALLCILLKKKLKFC

SEQ ID NO: 37025 - protein, 15 aa, BK virus
ALLCILLKKKLKFCI

SEQ ID NO: 37026 - protein, 15 aa, BK virus
LLCILLKKKLKFCIK

SEQ ID NO: 37027 - protein, 15 aa, BK virus
LCILLKKKLKFCIKN

SEQ ID NO: 37028 - protein, 15 aa, BK virus
CILLKKKLKFCIKNL

SEQ ID NO: 37029 - protein, 15 aa, BK virus
ILLKKKLKFCIKNLW

SEQ ID NO: 37030 - protein, 15 aa, BK virus
LLKKKLKFCIKNLWK

SEQ ID NO: 37031 - protein, 15 aa, BK virus
LKKKLKFCIKNLWKN

SEQ ID NO: 37032 - protein, 15 aa, BK virus
KKKLKFCIKNLWKNI

SEQ ID NO: 37033 - protein, 15 aa, BK virus
KKLKFCIKNLWKNIL

SEQ ID NO: 37034 - protein, 15 aa, BK virus
LLLVDTCVLGIILYS

SEQ ID NO: 37035 - protein, 15 aa, BK virus
LLVDTCVLGIILYSF

SEQ ID NO: 37036 - protein, 15 aa, BK virus
LHIDIEFLQLIISVK

SEQ ID NO: 37037 - protein, 15 aa, BK virus
HIDIEFLQLIISVKS

SEQ ID NO: 37038 - protein, 15 aa, BK virus
IDIEFLQLIISVKSC

SEQ ID NO: 37039 - protein, 15 aa, BK virus
DIEFLQLIISVKSCV

SEQ ID NO: 37040 - protein, 15 aa, BK virus
IEFLQLIISVKSCVP

SEQ ID NO: 37041 - protein, 15 aa, BK virus
EFLQLIISVKSCVPL

SEQ ID NO: 37042 - protein, 15 aa, BK virus
FLQLIISVKSCVPLV

SEQ ID NO: 37043 - protein, 15 aa, BK virus
LQLIISVKSCVPLVF

SEQ ID NO: 37044 - protein, 15 aa, BK virus
RSMILAQKSLKKQSR

SEQ ID NO: 37045 - protein, 15 aa, BK virus
SMILAQKSLKKQSRC

SEQ ID NO: 37046 - protein, 15 aa, BK virus
MILAQKSLKKQSRCL

SEQ ID NO: 37047 - protein, 15 aa, BK virus
ILAQKSLKKQSRCLG

SEQ ID NO: 37048 - protein, 15 aa, BK virus
LAQKSLKKQSRCLGN

SEQ ID NO: 37049 - protein, 15 aa, BK virus
RSVKSVRKKTSLITL

SEQ ID NO: 37050 - protein, 15 aa, BK virus
SVKSVRKKTSLITLS

SEQ ID NO: 37051 - protein, 15 aa, BK virus
VKSVRKKTSLITLSI

SEQ ID NO: 37052 - protein, 15 aa, BK virus
KSVRKKTSLITLSIM

SEQ ID NO: 37053 - protein, 15 aa, BK virus
SVRKKTSLITLSIMK

SEQ ID NO: 37054 - protein, 15 aa, BK virus
VRKKTSLITLSIMKS

SEQ ID NO: 37055 - protein, 15 aa, BK virus
RKKTSLITLSIMKST

SEQ ID NO: 37056 - protein, 15 aa, BK virus
KKTSLITLSIMKSTL

SEQ ID NO: 37057 - protein, 15 aa, BK virus
KTSLITLSIMKSTLQ

SEQ ID NO: 37058 - protein, 15 aa, BK virus
TSLITLSIMKSTLQM

SEQ ID NO: 37059 - protein, 15 aa, BK virus
SLITLSIMKSTLQML

SEQ ID NO: 37060 - protein, 15 aa, BK virus
LITLSIMKSTLQMLL

SEQ ID NO: 37061 - protein, 15 aa, BK virus
ITLSIMKSTLQMLLF

SEQ ID NO: 37062 - protein, 15 aa, BK virus
TLSIMKSTLQMLLFL

SEQ ID NO: 37063 - protein, 15 aa, BK virus
LSIMKSTLQMLLFLQ

SEQ ID NO: 37064 - protein, 15 aa, BK virus
SIMKSTLQMLLFLQK

SEQ ID NO: 37065 - protein, 15 aa, BK virus
IMKSTLQMLLFLQKV

SEQ ID NO: 37066 - protein, 15 aa, BK virus
MKSTLQMLLFLQKVK

SEQ ID NO: 37067 - protein, 15 aa, BK virus
KSTLQMLLFLQKVKI

SEQ ID NO: 37068 - protein, 15 aa, BK virus
STLQMLLFLQKVKIK

SEQ ID NO: 37069 - protein, 15 aa, BK virus
TLQMLLFLQKVKIKK

SEQ ID NO: 37070 - protein, 15 aa, BK virus
LQMLLFLQKVKIKKV

SEQ ID NO: 37071 - protein, 15 aa, BK virus
QMLLFLQKVKIKKVF

SEQ ID NO: 37072 - protein, 15 aa, BK virus
MLLFLQKVKIKKVFV

SEQ ID NO: 37073 - protein, 15 aa, BK virus
LLFLQKVKIKKVFVS

SEQ ID NO: 37074 - protein, 15 aa, BK virus
LFLQKVKIKKVFVSK

SEQ ID NO: 37075 - protein, 15 aa, BK virus
FLQKVKIKKVFVSKQ

SEQ ID NO: 37076 - protein, 15 aa, BK virus
NNIWQVLLGCTVCYL

SEQ ID NO: 37077 - protein, 15 aa, BK virus
NIWQVLLGCTVCYLK

SEQ ID NO: 37078 - protein, 15 aa, BK virus
IWQVLLGCTVCYLKW

SEQ ID NO: 37079 - protein, 15 aa, BK virus
WQVLLGCTVCYLKWI

SEQ ID NO: 37080 - protein, 15 aa, BK virus
QVLLGCTVCYLKWIL

SEQ ID NO: 37081 - protein, 15 aa, BK virus
YLIFCTVLFSMYLKE

SEQ ID NO: 37082 - protein, 15 aa, BK virus
LIFCTVLFSMYLKED

SEQ ID NO: 37083 - protein, 15 aa, BK virus
IFCTVLFSMYLKEDT

SEQ ID NO: 37084 - protein, 15 aa, BK virus
FCTVLFSMYLKEDTG

SEQ ID NO: 37085 - protein, 15 aa, BK virus
CTVLFSMYLKEDTGY

SEQ ID NO: 37086 - protein, 15 aa, BK virus
TVLFSMYLKEDTGYL

SEQ ID NO: 37087 - protein, 15 aa, BK virus
VLFSMYLKEDTGYLK

SEQ ID NO: 37088 - protein, 15 aa, BK virus
LFSMYLKEDTGYLKV

SEQ ID NO: 37089 - protein, 15 aa, BK virus
FSMYLKEDTGYLKVP

SEQ ID NO: 37090 - protein, 15 aa, BK virus
SMYLKEDTGYLKVPL

SEQ ID NO: 37091 - protein, 15 aa, BK virus
MYLKEDTGYLKVPLI

SEQ ID NO: 37092 - protein, 15 aa, BK virus
YLKEDTGYLKVPLIV

SEQ ID NO: 37093 - protein, 15 aa, BK virus
LKEDTGYLKVPLIVE

SEQ ID NO: 37094 - protein, 15 aa, BK virus
KEDTGYLKVPLIVEK

SEQ ID NO: 37095 - protein, 15 aa, BK virus
EDTGYLKVPLIVEKQ

SEQ ID NO: 37096 - protein, 15 aa, BK virus
DTGYLKVPLIVEKQH

SEQ ID NO: 37097 - protein, 15 aa, BK virus
KGQELNQRICLQDME

SEQ ID NO: 37098 - protein, 15 aa, BK virus
ENPYKTQSSYLKKEF

SEQ ID NO: 37099 - protein, 15 aa, BK virus
NPYKTQSSYLKKEFY

SEQ ID NO: 37100 - protein, 15 aa, BK virus
PYKTQSSYLKKEFYK

SEQ ID NO: 37101 - protein, 15 aa, BK virus
YKTQSSYLKKEFYKV

SEQ ID NO: 37102 - protein, 15 aa, BK virus
KTQSSYLKKEFYKVE

SEQ ID NO: 37103 - protein, 15 aa, BK virus
LILQLIYNLELLNGR

SEQ ID NO: 37104 - protein, 15 aa, BK virus
ILQLIYNLELLNGRK

SEQ ID NO: 37105 - protein, 15 aa, BK virus
LQLIYNLELLNGRKG

SEQ ID NO: 37106 - protein, 15 aa, BK virus
QLIYNLELLNGRKGW

SEQ ID NO: 37107 - protein, 15 aa, BK virus
LIYNLELLNGRKGWI

SEQ ID NO: 37108 - protein, 15 aa, BK virus
IYNLELLNGRKGWIL

SEQ ID NO: 37109 - protein, 15 aa, BK virus
YNLELLNGRKGWILR

SEQ ID NO: 37110 - protein, 15 aa, BK virus
NIIYAWGNVFLILQE

SEQ ID NO: 37111 - protein, 15 aa, BK virus
IIYAWGNVFLILQEK

SEQ ID NO: 37112 - protein, 15 aa, BK virus
IYAWGNVFLILQEKR

SEQ ID NO: 37113 - protein, 15 aa, BK virus
YAWGNVFLILQEKRI

SEQ ID NO: 37114 - protein, 15 aa, BK virus
AWGNVFLILQEKRIQ

SEQ ID NO: 37115 - protein, 15 aa, BK virus
WGNVFLILQEKRIQK

SEQ ID NO: 37116 - protein, 15 aa, BK virus
GNVFLILQEKRIQKL

SEQ ID NO: 37117 - protein, 15 aa, BK virus
NVFLILQEKRIQKLK

SEQ ID NO: 37118 - protein, 15 aa, BK virus
VFLILQEKRIQKLKT

SEQ ID NO: 37119 - protein, 15 aa, BK virus
FLILQEKRIQKLKTL

SEQ ID NO: 37120 - protein, 15 aa, BK virus
LILQEKRIQKLKTLD

SEQ ID NO: 37121 - protein, 15 aa, BK virus
ILQEKRIQKLKTLDM

SEQ ID NO: 37122 - protein, 15 aa, BK virus
LQEKRIQKLKTLDMD

SEQ ID NO: 37123 - protein, 15 aa, BK virus
QEKRIQKLKTLDMDQ

SEQ ID NO: 37124 - protein, 15 aa, BK virus
EKRIQKLKTLDMDQA

SEQ ID NO: 37125 - protein, 15 aa, BK virus
KRIQKLKTLDMDQAL

SEQ ID NO: 37126 - protein, 15 aa, BK virus
RIQKLKTLDMDQALN

SEQ ID NO: 37127 - protein, 15 aa, BK virus
IQKLKTLDMDQALNP

SEQ ID NO: 37128 - protein, 15 aa, BK virus
QKLKTLDMDQALNPN

SEQ ID NO: 37129 - protein, 15 aa, BK virus
KLKTLDMDQALNPNH

SEQ ID NO: 37130 - protein, 15 aa, BK virus
LKTLDMDQALNPNHN

SEQ ID NO: 37131 - protein, 15 aa, BK virus
KTLDMDQALNPNHNA

SEQ ID NO: 37132 - protein, 15 aa, BK virus
TLDMDQALNPNHNAL

SEQ ID NO: 37133 - protein, 15 aa, BK virus
LDMDQALNPNHNALP

SEQ ID NO: 37134 - protein, 15 aa, BK virus
DMDQALNPNHNALPK

SEQ ID NO: 37135 - protein, 15 aa, BK virus
MDQALNPNHNALPKS

SEQ ID NO: 37136 - protein, 15 aa, BK virus
DQALNPNHNALPKSQ

SEQ ID NO: 37137 - protein, 15 aa, BK virus
QALNPNHNALPKSQI

SEQ ID NO: 37138 - protein, 15 aa, BK virus
ALNPNHNALPKSQIL

SEQ ID NO: 37139 - protein, 15 aa, BK virus
LNPNHNALPKSQILQ

SEQ ID NO: 37140 - protein, 15 aa, BK virus
NPNHNALPKSQILQP

SEQ ID NO: 37141 - protein, 15 aa, BK virus
PNHNALPKSQILQPL

SEQ ID NO: 37142 - protein, 15 aa, BK virus
NHNALPKSQILQPLL

SEQ ID NO: 37143 - protein, 15 aa, BK virus
HNALPKSQILQPLLK

SEQ ID NO: 37144 - protein, 15 aa, BK virus
NALPKSQILQPLLKI

SEQ ID NO: 37145 - protein, 15 aa, BK virus
ALPKSQILQPLLKIP

SEQ ID NO: 37146 - protein, 15 aa, BK virus
LPKSQILQPLLKIPK

SEQ ID NO: 37147 - protein, 15 aa, BK virus
PKSQILQPLLKIPKG

SEQ ID NO: 37148 - protein, 15 aa, BK virus
KSQILQPLLKIPKGQ

SEQ ID NO: 37149 - protein, 15 aa, BK virus
SQILQPLLKIPKGQT

SEQ ID NO: 37150 - protein, 15 aa, BK virus
QILQPLLKIPKGQTP

SEQ ID NO: 37151 - protein, 15 aa, BK virus
ILQPLLKIPKGQTPI

SEQ ID NO: 37152 - protein, 15 aa, BK virus
LQPLLKIPKGQTPIV

SEQ ID NO: 37153 - protein, 15 aa, BK virus
QPLLKIPKGQTPIVK

SEQ ID NO: 37154 - protein, 15 aa, BK virus
PLLKIPKGQTPIVKS

SEQ ID NO: 37155 - protein, 15 aa, BK virus
LLKIPKGQTPIVKSC

SEQ ID NO: 37156 - protein, 15 aa, BK virus
LKIPKGQTPIVKSCI

SEQ ID NO: 37157 - protein, 15 aa, BK virus
KIPKGQTPIVKSCIC

SEQ ID NO: 37158 - protein, 15 aa, BK virus
IPKGQTPIVKSCICV

SEQ ID NO: 37159 - protein, 15 aa, BK virus
PKGQTPIVKSCICVK

SEQ ID NO: 37160 - protein, 15 aa, BK virus
KGQTPIVKSCICVKA

SEQ ID NO: 37161 - protein, 15 aa, BK virus
GQTPIVKSCICVKAF

SEQ ID NO: 37162 - protein, 15 aa, BK virus
QTPIVKSCICVKAFS

SEQ ID NO: 37163 - protein, 15 aa, BK virus
TPIVKSCICVKAFSV

SEQ ID NO: 37164 - protein, 15 aa, BK virus
PIVKSCICVKAFSVL

SEQ ID NO: 37165 - protein, 15 aa, BK virus
IVKSCICVKAFSVLK

SEQ ID NO: 37166 - protein, 15 aa, BK virus
VKSCICVKAFSVLKG

SEQ ID NO: 37167 - protein, 15 aa, BK virus
KSCICVKAFSVLKGL

SEQ ID NO: 37168 - protein, 15 aa, BK virus
SCICVKAFSVLKGLK

SEQ ID NO: 37169 - protein, 15 aa, BK virus
CICVKAFSVLKGLKH

SEQ ID NO: 37170 - protein, 15 aa, BK virus
ICVKAFSVLKGLKHH

SEQ ID NO: 37171 - protein, 15 aa, BK virus
CVKAFSVLKGLKHHP

SEQ ID NO: 37172 - protein, 15 aa, BK virus
VKAFSVLKGLKHHPQ

SEQ ID NO: 37173 - protein, 15 aa, BK virus
KAFSVLKGLKHHPQN

SEQ ID NO: 37174 - protein, 15 aa, BK virus
AFSVLKGLKHHPQNN

SEQ ID NO: 37175 - protein, 15 aa, BK virus
FSVLKGLKHHPQNNT

SEQ ID NO: 37176 - protein, 15 aa, BK virus
SVLKGLKHHPQNNTS

SEQ ID NO: 37177 - protein, 15 aa, BK virus
VLKGLKHHPQNNTSL

SEQ ID NO: 37178 - protein, 15 aa, BK virus
LKGLKHHPQNNTSLK

SEQ ID NO: 37179 - protein, 15 aa, BK virus
KGLKHHPQNNTSLKV

SEQ ID NO: 37180 - protein, 15 aa, BK virus
GLKHHPQNNTSLKVA

SEQ ID NO: 37181 - protein, 15 aa, BK virus
LKHHPQNNTSLKVAY

SEQ ID NO: 37182 - protein, 15 aa, BK virus
KHHPQNNTSLKVAYT

SEQ ID NO: 37183 - protein, 15 aa, BK virus
HHPQNNTSLKVAYTK

SEQ ID NO: 37184 - protein, 15 aa, BK virus
HPQNNTSLKVAYTKA

SEQ ID NO: 37185 - protein, 15 aa, BK virus
PQNNTSLKVAYTKAA

SEQ ID NO: 37186 - protein, 15 aa, BK virus
QNNTSLKVAYTKAAF

SEQ ID NO: 37187 - protein, 15 aa, BK virus
NNTSLKVAYTKAAFI

SEQ ID NO: 37188 - protein, 15 aa, BK virus
NTSLKVAYTKAAFIK

SEQ ID NO: 37189 - protein, 15 aa, BK virus
TSLKVAYTKAAFIKC

SEQ ID NO: 37190 - protein, 15 aa, BK virus
SLKVAYTKAAFIKCI

SEQ ID NO: 37191 - protein, 15 aa, BK virus
LKVAYTKAAFIKCIC

SEQ ID NO: 37192 - protein, 15 aa, BK virus
KVAYTKAAFIKCICT

SEQ ID NO: 37193 - protein, 15 aa, BK virus
VAYTKAAFIKCICTI

SEQ ID NO: 37194 - protein, 15 aa, BK virus
AYTKAAFIKCICTIK

SEQ ID NO: 37195 - protein, 15 aa, BK virus
YTKAAFIKCICTIKA

SEQ ID NO: 37196 - protein, 15 aa, BK virus
TKAAFIKCICTIKAP

SEQ ID NO: 37197 - protein, 15 aa, BK virus
KAAFIKCICTIKAPV

SEQ ID NO: 37198 - protein, 15 aa, BK virus
SILVCNCPCLSIYLI

SEQ ID NO: 37199 - protein, 15 aa, BK virus
ILVCNCPCLSIYLII

SEQ ID NO: 37200 - protein, 15 aa, BK virus
LVCNCPCLSIYLIIS

SEQ ID NO: 37201 - protein, 15 aa, BK virus
VCNCPCLSIYLIISG

SEQ ID NO: 37202 - protein, 15 aa, BK virus
CNCPCLSIYLIISGS

SEQ ID NO: 37203 - protein, 15 aa, BK virus
NCPCLSIYLIISGSP

SEQ ID NO: 37204 - protein, 15 aa, BK virus
CPCLSIYLIISGSPG

SEQ ID NO: 37205 - protein, 15 aa, BK virus
PCLSIYLIISGSPGS

SEQ ID NO: 37206 - protein, 15 aa, BK virus
CLSIYLIISGSPGSL

SEQ ID NO: 37207 - protein, 15 aa, BK virus
LSIYLIISGSPGSLS

SEQ ID NO: 37208 - protein, 15 aa, BK virus
SIYLIISGSPGSLSV

SEQ ID NO: 37209 - protein, 15 aa, BK virus
IYLIISGSPGSLSVP

SEQ ID NO: 37210 - protein, 15 aa, BK virus
YLIISGSPGSLSVPS

SEQ ID NO: 37211 - protein, 15 aa, BK virus
LIISGSPGSLSVPSN

SEQ ID NO: 37212 - protein, 15 aa, BK virus
IISGSPGSLSVPSNT

SEQ ID NO: 37213 - protein, 15 aa, BK virus
ISGSPGSLSVPSNTL

SEQ ID NO: 37214 - protein, 15 aa, BK virus
SGSPGSLSVPSNTLT

SEQ ID NO: 37215 - protein, 15 aa, BK virus
GSPGSLSVPSNTLTS

SEQ ID NO: 37216 - protein, 15 aa, BK virus
SPGSLSVPSNTLTSS

SEQ ID NO: 37217 - protein, 15 aa, BK virus
PGSLSVPSNTLTSST

SEQ ID NO: 37218 - protein, 15 aa, BK virus
GSLSVPSNTLTSSTW

SEQ ID NO: 37219 - protein, 15 aa, BK virus
SLSVPSNTLTSSTWD

SEQ ID NO: 37220 - protein, 15 aa, BK virus
LSVPSNTLTSSTWDS

SEQ ID NO: 37221 - protein, 15 aa, BK virus
SVPSNTLTSSTWDSI

SEQ ID NO: 37222 - protein, 15 aa, BK virus
VPSNTLTSSTWDSIP

SEQ ID NO: 37223 - protein, 15 aa, BK virus
PSNTLTSSTWDSIPY

SEQ ID NO: 37224 - protein, 15 aa, BK virus
SNTLTSSTWDSIPYI

SEQ ID NO: 37225 - protein, 15 aa, BK virus
NTLTSSTWDSIPYIG

SEQ ID NO: 37226 - protein, 15 aa, BK virus
TLTSSTWDSIPYIGC

SEQ ID NO: 37227 - protein, 15 aa, BK virus
LTSSTWDSIPYIGCP

SEQ ID NO: 37228 - protein, 15 aa, BK virus
TSSTWDSIPYIGCPS

SEQ ID NO: 37229 - protein, 15 aa, BK virus
SSTWDSIPYIGCPST

SEQ ID NO: 37230 - protein, 15 aa, BK virus
STWDSIPYIGCPSTL

SEQ ID NO: 37231 - protein, 15 aa, BK virus
TWDSIPYIGCPSTLW

SEQ ID NO: 37232 - protein, 15 aa, BK virus
WDSIPYIGCPSTLWV

SEQ ID NO: 37233 - protein, 15 aa, BK virus
DSIPYIGCPSTLWVL

SEQ ID NO: 37234 - protein, 15 aa, BK virus
SIPYIGCPSTLWVLL

SEQ ID NO: 37235 - protein, 15 aa, BK virus
IPYIGCPSTLWVLLF

SEQ ID NO: 37236 - protein, 15 aa, BK virus
PYIGCPSTLWVLLFI

SEQ ID NO: 37237 - protein, 15 aa, BK virus
YIGCPSTLWVLLFIR

SEQ ID NO: 37238 - protein, 15 aa, BK virus
IGCPSTLWVLLFIRS

SEQ ID NO: 37239 - protein, 15 aa, BK virus
GCPSTLWVLLFIRSL

SEQ ID NO: 37240 - protein, 15 aa, BK virus
CPSTLWVLLFIRSLS

SEQ ID NO: 37241 - protein, 15 aa, BK virus
PSTLWVLLFIRSLSK

SEQ ID NO: 37242 - protein, 15 aa, BK virus
STLWVLLFIRSLSKK

SEQ ID NO: 37243 - protein, 15 aa, BK virus
TLWVLLFIRSLSKKE

SEQ ID NO: 37244 - protein, 15 aa, BK virus
LWVLLFIRSLSKKEI

SEQ ID NO: 37245 - protein, 15 aa, BK virus
WVLLFIRSLSKKEIG

SEQ ID NO: 37246 - protein, 15 aa, BK virus
GFFTDLFLRRILKYL

SEQ ID NO: 37247 - protein, 15 aa, BK virus
FFTDLFLRRILKYLA

SEQ ID NO: 37248 - protein, 15 aa, BK virus
FTDLFLRRILKYLAR

SEQ ID NO: 37249 - protein, 15 aa, BK virus
TDLFLRRILKYLARP

SEQ ID NO: 37250 - protein, 15 aa, BK virus
DLFLRRILKYLARPL

SEQ ID NO: 37251 - protein, 15 aa, BK virus
LFLRRILKYLARPLH

SEQ ID NO: 37252 - protein, 15 aa, BK virus
FLRRILKYLARPLHC

SEQ ID NO: 37253 - protein, 15 aa, BK virus
LRRILKYLARPLHCC

SEQ ID NO: 37254 - protein, 15 aa, BK virus
RRILKYLARPLHCCV

SEQ ID NO: 37255 - protein, 15 aa, BK virus
RILKYLARPLHCCVP

SEQ ID NO: 37256 - protein, 15 aa, BK virus
ILKYLARPLHCCVPE

SEQ ID NO: 37257 - protein, 15 aa, BK virus
LKYLARPLHCCVPEL

SEQ ID NO: 37258 - protein, 15 aa, BK virus
KYLARPLHCCVPELL

SEQ ID NO: 37259 - protein, 15 aa, BK virus
YLARPLHCCVPELLV

SEQ ID NO: 37260 - protein, 15 aa, BK virus
LARPLHCCVPELLVN

SEQ ID NO: 37261 - protein, 15 aa, BK virus
ARPLHCCVPELLVNR

SEQ ID NO: 37262 - protein, 15 aa, BK virus
RPLHCCVPELLVNRP

SEQ ID NO: 37263 - protein, 15 aa, BK virus
PLHCCVPELLVNRPQ

SEQ ID NO: 37264 - protein, 15 aa, BK virus
LHCCVPELLVNRPQI

SEQ ID NO: 37265 - protein, 15 aa, BK virus
HCCVPELLVNRPQIS

SEQ ID NO: 37266 - protein, 15 aa, BK virus
CCVPELLVNRPQISA

SEQ ID NO: 37267 - protein, 15 aa, BK virus
CVPELLVNRPQISAA

SEQ ID NO: 37268 - protein, 15 aa, BK virus
VPELLVNRPQISAAE

SEQ ID NO: 37269 - protein, 15 aa, BK virus
PELLVNRPQISAAET

SEQ ID NO: 37270 - protein, 15 aa, BK virus
ELLVNRPQISAAETY

SEQ ID NO: 37271 - protein, 15 aa, BK virus
LLVNRPQISAAETYR

SEQ ID NO: 37272 - protein, 15 aa, BK virus
LVNRPQISAAETYRL

SEQ ID NO: 37273 - protein, 15 aa, BK virus
VNRPQISAAETYRLS

SEQ ID NO: 37274 - protein, 15 aa, BK virus
NRPQISAAETYRLSA

SEQ ID NO: 37275 - protein, 15 aa, BK virus
RPQISAAETYRLSAL

SEQ ID NO: 37276 - protein, 15 aa, BK virus
PQISAAETYRLSALQ

SEQ ID NO: 37277 - protein, 15 aa, BK virus
QISAAETYRLSALQR

SEQ ID NO: 37278 - protein, 15 aa, BK virus
ISAAETYRLSALQRG

SEQ ID NO: 37279 - protein, 15 aa, BK virus
SAAETYRLSALQRGP

SEQ ID NO: 37280 - protein, 15 aa, BK virus
AAETYRLSALQRGPT

SEQ ID NO: 37281 - protein, 15 aa, BK virus
AETYRLSALQRGPTP

SEQ ID NO: 37282 - protein, 15 aa, BK virus
ETYRLSALQRGPTPC

SEQ ID NO: 37283 - protein, 15 aa, BK virus
TYRLSALQRGPTPCS

SEQ ID NO: 37284 - protein, 15 aa, BK virus
YRLSALQRGPTPCSS

SEQ ID NO: 37285 - protein, 15 aa, BK virus
RLSALQRGPTPCSSS

SEQ ID NO: 37286 - protein, 15 aa, BK virus
LSALQRGPTPCSSSN

SEQ ID NO: 37287 - protein, 15 aa, BK virus
SALQRGPTPCSSSNT

SEQ ID NO: 37288 - protein, 15 aa, BK virus
ALQRGPTPCSSSNTV

SEQ ID NO: 37289 - protein, 15 aa, BK virus
LQRGPTPCSSSNTVV

SEQ ID NO: 37290 - protein, 15 aa, BK virus
QRGPTPCSSSNTVVA

SEQ ID NO: 37291 - protein, 15 aa, BK virus
RGPTPCSSSNTVVAV

SEQ ID NO: 37292 - protein, 15 aa, BK virus
GPTPCSSSNTVVAVL

SEQ ID NO: 37293 - protein, 15 aa, BK virus
PTPCSSSNTVVAVLV

SEQ ID NO: 37294 - protein, 15 aa, BK virus
TPCSSSNTVVAVLVT

SEQ ID NO: 37295 - protein, 15 aa, BK virus
STGGTFSPPVKVPKY

SEQ ID NO: 37296 - protein, 15 aa, BK virus
TGGTFSPPVKVPKYL

SEQ ID NO: 37297 - protein, 15 aa, BK virus
GGTFSPPVKVPKYLA

SEQ ID NO: 37298 - protein, 15 aa, BK virus
GTFSPPVKVPKYLAF

SEQ ID NO: 37299 - protein, 15 aa, BK virus
TFSPPVKVPKYLAFS

SEQ ID NO: 37300 - protein, 15 aa, BK virus
FSPPVKVPKYLAFSF

SEQ ID NO: 37301 - protein, 15 aa, BK virus
SPPVKVPKYLAFSFL

SEQ ID NO: 37302 - protein, 15 aa, BK virus
PPVKVPKYLAFSFLL

SEQ ID NO: 37303 - protein, 15 aa, BK virus
PVKVPKYLAFSFLLG

SEQ ID NO: 37304 - protein, 15 aa, BK virus
VKVPKYLAFSFLLGS

SEQ ID NO: 37305 - protein, 15 aa, BK virus
KVPKYLAFSFLLGSG

SEQ ID NO: 37306 - protein, 15 aa, BK virus
VPKYLAFSFLLGSGT

SEQ ID NO: 37307 - protein, 15 aa, BK virus
PKYLAFSFLLGSGTQ

SEQ ID NO: 37308 - protein, 15 aa, BK virus
KYLAFSFLLGSGTQH

SEQ ID NO: 37309 - protein, 15 aa, BK virus
YLAFSFLLGSGTQHS

SEQ ID NO: 37310 - protein, 15 aa, BK virus
LAFSFLLGSGTQHST

SEQ ID NO: 37311 - protein, 15 aa, BK virus
AFSFLLGSGTQHSTG

SEQ ID NO: 37312 - protein, 15 aa, BK virus
ALWSVFITWDWAVGF

SEQ ID NO: 37313 - protein, 15 aa, BK virus
LWSVFITWDWAVGFL

SEQ ID NO: 37314 - protein, 15 aa, BK virus
WSVFITWDWAVGFLG

SEQ ID NO: 37315 - protein, 15 aa, BK virus
SVFITWDWAVGFLGV

SEQ ID NO: 37316 - protein, 15 aa, BK virus
VFITWDWAVGFLGVI

SEQ ID NO: 37317 - protein, 15 aa, BK virus
FITWDWAVGFLGVIV

SEQ ID NO: 37318 - protein, 15 aa, BK virus
ITWDWAVGFLGVIVP

SEQ ID NO: 37319 - protein, 15 aa, BK virus
TWDWAVGFLGVIVPS

SEQ ID NO: 37320 - protein, 15 aa, BK virus
WDWAVGFLGVIVPSG

SEQ ID NO: 37321 - protein, 15 aa, BK virus
DWAVGFLGVIVPSGY

SEQ ID NO: 37322 - protein, 15 aa, BK virus
WAVGFLGVIVPSGYF

SEQ ID NO: 37323 - protein, 15 aa, BK virus
AVGFLGVIVPSGYFD

SEQ ID NO: 37324 - protein, 15 aa, BK virus
VGFLGVIVPSGYFDL

SEQ ID NO: 37325 - protein, 15 aa, BK virus
FISTPCISKGSPPTA

SEQ ID NO: 37326 - protein, 15 aa, BK virus
ISTPCISKGSPPTAK

SEQ ID NO: 37327 - protein, 15 aa, BK virus
STPCISKGSPPTAKK

SEQ ID NO: 37328 - protein, 15 aa, BK virus
TPCISKGSPPTAKKW

SEQ ID NO: 37329 - protein, 15 aa, BK virus
PCISKGSPPTAKKWK

SEQ ID NO: 37330 - protein, 15 aa, BK virus
CISKGSPPTAKKWKL

SEQ ID NO: 37331 - protein, 15 aa, BK virus
ISKGSPPTAKKWKLL

SEQ ID NO: 37332 - protein, 15 aa, BK virus
SKGSPPTAKKWKLLP

SEQ ID NO: 37333 - protein, 15 aa, BK virus
IGFPPPCSCTFCDPA

SEQ ID NO: 37334 - protein, 15 aa, BK virus
RLSMLVIPITSVCTV

SEQ ID NO: 37335 - protein, 15 aa, BK virus
LSMLVIPITSVCTVT

SEQ ID NO: 37336 - protein, 15 aa, BK virus
SMLVIPITSVCTVTA

SEQ ID NO: 37337 - protein, 15 aa, BK virus
MLVIPITSVCTVTAS

SEQ ID NO: 37338 - protein, 15 aa, BK virus
LVIPITSVCTVTASH

SEQ ID NO: 37339 - protein, 15 aa, BK virus
VIPITSVCTVTASHI

SEQ ID NO: 37340 - protein, 15 aa, BK virus
IPITSVCTVTASHIS

SEQ ID NO: 37341 - protein, 15 aa, BK virus
PITSVCTVTASHISR

SEQ ID NO: 37342 - protein, 15 aa, BK virus
ITSVCTVTASHISRF

SEQ ID NO: 37343 - protein, 15 aa, BK virus
TSVCTVTASHISRFP

SEQ ID NO: 37344 - protein, 15 aa, BK virus
SVCTVTASHISRFPQ

SEQ ID NO: 37345 - protein, 15 aa, BK virus
VCTVTASHISRFPQV

SEQ ID NO: 37346 - protein, 15 aa, BK virus
CTVTASHISRFPQVR

SEQ ID NO: 37347 - protein, 15 aa, BK virus
TVTASHISRFPQVRS

SEQ ID NO: 37348 - protein, 15 aa, BK virus
VTASHISRFPQVRSS

SEQ ID NO: 37349 - protein, 15 aa, BK virus
TASHISRFPQVRSSF

SEQ ID NO: 37350 - protein, 15 aa, BK virus
ASHISRFPQVRSSFK

SEQ ID NO: 37351 - protein, 15 aa, BK virus
SHISRFPQVRSSFKL

SEQ ID NO: 37352 - protein, 15 aa, BK virus
HISRFPQVRSSFKLG

SEQ ID NO: 37353 - protein, 15 aa, BK virus
ISRFPQVRSSFKLGR

SEQ ID NO: 37354 - protein, 15 aa, BK virus
SRFPQVRSSFKLGRG

SEQ ID NO: 37355 - protein, 15 aa, BK virus
RFPQVRSSFKLGRGI

SEQ ID NO: 37356 - protein, 15 aa, BK virus
FPQVRSSFKLGRGIL

SEQ ID NO: 37357 - protein, 15 aa, BK virus
PQVRSSFKLGRGILA

SEQ ID NO: 37358 - protein, 15 aa, BK virus
QVRSSFKLGRGILAV

SEQ ID NO: 37359 - protein, 15 aa, BK virus
VRSSFKLGRGILAVL

SEQ ID NO: 37360 - protein, 15 aa, BK virus
QGSIFLSGLSLLKSF

SEQ ID NO: 37361 - protein, 15 aa, BK virus
GSIFLSGLSLLKSFS

SEQ ID NO: 37362 - protein, 15 aa, BK virus
SIFLSGLSLLKSFSA

SEQ ID NO: 37363 - protein, 15 aa, BK virus
IFLSGLSLLKSFSAL

SEQ ID NO: 37364 - protein, 15 aa, BK virus
FLSGLSLLKSFSALS

SEQ ID NO: 37365 - protein, 15 aa, BK virus
LSGLSLLKSFSALSF

SEQ ID NO: 37366 - protein, 15 aa, BK virus
SGLSLLKSFSALSFR

SEQ ID NO: 37367 - protein, 15 aa, BK virus
GLSLLKSFSALSFRL

SEQ ID NO: 37368 - protein, 15 aa, BK virus
LSLLKSFSALSFRLK

SEQ ID NO: 37369 - protein, 15 aa, BK virus
SLLKSFSALSFRLKP

SEQ ID NO: 37370 - protein, 15 aa, BK virus
LLKSFSALSFRLKPL

SEQ ID NO: 37371 - protein, 15 aa, BK virus
LKSFSALSFRLKPLR

SEQ ID NO: 37372 - protein, 15 aa, BK virus
KSFSALSFRLKPLRF

SEQ ID NO: 37373 - protein, 15 aa, BK virus
SFSALSFRLKPLRFS

SEQ ID NO: 37374 - protein, 15 aa, BK virus
FSALSFRLKPLRFSS

SEQ ID NO: 37375 - protein, 15 aa, BK virus
SALSFRLKPLRFSSG

SEQ ID NO: 37376 - protein, 15 aa, BK virus
ALSFRLKPLRFSSGS

SEQ ID NO: 37377 - protein, 15 aa, BK virus
LSFRLKPLRFSSGSP

SEQ ID NO: 37378 - protein, 15 aa, BK virus
SFRLKPLRFSSGSPI

SEQ ID NO: 37379 - protein, 15 aa, BK virus
FRLKPLRFSSGSPIS

SEQ ID NO: 37380 - protein, 15 aa, BK virus
RLKPLRFSSGSPISG

SEQ ID NO: 37381 - protein, 15 aa, BK virus
LKPLRFSSGSPISGF

SEQ ID NO: 37382 - protein, 15 aa, BK virus
KPLRFSSGSPISGFR

SEQ ID NO: 37383 - protein, 15 aa, BK virus
PLRFSSGSPISGFRK

SEQ ID NO: 37384 - protein, 15 aa, BK virus
LRFSSGSPISGFRKH

SEQ ID NO: 37385 - protein, 15 aa, BK virus
RFSSGSPISGFRKHS

SEQ ID NO: 37386 - protein, 15 aa, BK virus
FSSGSPISGFRKHST

SEQ ID NO: 37387 - protein, 15 aa, BK virus
SSGSPISGFRKHSTS

SEQ ID NO: 37388 - protein, 15 aa, BK virus
SGSPISGFRKHSTSV

SEQ ID NO: 37389 - protein, 15 aa, BK virus
GSPISGFRKHSTSVI

SEQ ID NO: 37390 - protein, 15 aa, BK virus
SPISGFRKHSTSVIA

SEQ ID NO: 37391 - protein, 15 aa, BK virus
PISGFRKHSTSVIAS

SEQ ID NO: 37392 - protein, 15 aa, BK virus
ISGFRKHSTSVIAST

SEQ ID NO: 37393 - protein, 15 aa, BK virus
SGFRKHSTSVIASTP

SEQ ID NO: 37394 - protein, 15 aa, BK virus
GFRKHSTSVIASTPV

SEQ ID NO: 37395 - protein, 15 aa, BK virus
FRKHSTSVIASTPVL

SEQ ID NO: 37396 - protein, 15 aa, BK virus
RKHSTSVIASTPVLT

SEQ ID NO: 37397 - protein, 15 aa, BK virus
KHSTSVIASTPVLTS

SEQ ID NO: 37398 - protein, 15 aa, BK virus
HSTSVIASTPVLTSR

SEQ ID NO: 37399 - protein, 15 aa, BK virus
STSVIASTPVLTSRT

SEQ ID NO: 37400 - protein, 15 aa, BK virus
TSVIASTPVLTSRTS

SEQ ID NO: 37401 - protein, 15 aa, BK virus
SVIASTPVLTSRTST

SEQ ID NO: 37402 - protein, 15 aa, BK virus
VIASTPVLTSRTSTP

SEQ ID NO: 37403 - protein, 15 aa, BK virus
IASTPVLTSRTSTPP

SEQ ID NO: 37404 - protein, 15 aa, BK virus
ASTPVLTSRTSTPPF

SEQ ID NO: 37405 - protein, 15 aa, BK virus
STPVLTSRTSTPPFI

SEQ ID NO: 37406 - protein, 15 aa, BK virus
TPVLTSRTSTPPFIS

SEQ ID NO: 37407 - protein, 15 aa, BK virus
PVLTSRTSTPPFISS

SEQ ID NO: 37408 - protein, 15 aa, BK virus
VLTSRTSTPPFISSF

SEQ ID NO: 37409 - protein, 15 aa, BK virus
LTSRTSTPPFISSFG

SEQ ID NO: 37410 - protein, 15 aa, BK virus
TSRTSTPPFISSFGT

SEQ ID NO: 37411 - protein, 15 aa, BK virus
SRTSTPPFISSFGTC

SEQ ID NO: 37412 - protein, 15 aa, BK virus
RTSTPPFISSFGTCT

SEQ ID NO: 37413 - protein, 15 aa, BK virus
TSTPPFISSFGTCTG

SEQ ID NO: 37414 - protein, 15 aa, BK virus
STPPFISSFGTCTGS

SEQ ID NO: 37415 - protein, 15 aa, BK virus
TPPFISSFGTCTGSF

SEQ ID NO: 37416 - protein, 15 aa, BK virus
PPFISSFGTCTGSFG

SEQ ID NO: 37417 - protein, 15 aa, BK virus
PFISSFGTCTGSFGF

SEQ ID NO: 37418 - protein, 15 aa, BK virus
FISSFGTCTGSFGFL

SEQ ID NO: 37419 - protein, 15 aa, BK virus
ISSFGTCTGSFGFLG

SEQ ID NO: 37420 - protein, 15 aa, BK virus
SSFGTCTGSFGFLGA

SEQ ID NO: 37421 - protein, 15 aa, BK virus
SFGTCTGSFGFLGAA

SEQ ID NO: 37422 - protein, 15 aa, BK virus
FGTCTGSFGFLGAAP

SEQ ID NO: 37423 - protein, 15 aa, BK virus
GTCTGSFGFLGAAPG

SEQ ID NO: 37424 - protein, 15 aa, BK virus
TCTGSFGFLGAAPGH

SEQ ID NO: 37425 - protein, 15 aa, BK virus
CTGSFGFLGAAPGHS

SEQ ID NO: 37426 - protein, 15 aa, BK virus
TGSFGFLGAAPGHSP

SEQ ID NO: 37427 - protein, 15 aa, BK virus
GSFGFLGAAPGHSPF

SEQ ID NO: 37428 - protein, 15 aa, BK virus
SFGFLGAAPGHSPFL

SEQ ID NO: 37429 - protein, 15 aa, BK virus
FGFLGAAPGHSPFLL

SEQ ID NO: 37430 - protein, 15 aa, BK virus
GFLGAAPGHSPFLLV

SEQ ID NO: 37431 - protein, 15 aa, BK virus
FLGAAPGHSPFLLVG

SEQ ID NO: 37432 - protein, 15 aa, BK virus
LGAAPGHSPFLLVGA

SEQ ID NO: 37433 - protein, 15 aa, BK virus
GAAPGHSPFLLVGAI

SEQ ID NO: 37434 - protein, 15 aa, BK virus
AAPGHSPFLLVGAIF

SEQ ID NO: 37435 - protein, 15 aa, BK virus
APGHSPFLLVGAIFI

SEQ ID NO: 37436 - protein, 15 aa, BK virus
PGHSPFLLVGAIFIC

SEQ ID NO: 37437 - protein, 15 aa, BK virus
GHSPFLLVGAIFICF

SEQ ID NO: 37438 - protein, 15 aa, BK virus
HSPFLLVGAIFICFK

SEQ ID NO: 37439 - protein, 15 aa, BK virus
SPFLLVGAIFICFKS

SEQ ID NO: 37440 - protein, 15 aa, BK virus
PFLLVGAIFICFKSR

SEQ ID NO: 37441 - protein, 15 aa, BK virus
FLLVGAIFICFKSRC

SEQ ID NO: 37442 - protein, 15 aa, BK virus
LLVGAIFICFKSRCY

SEQ ID NO: 37443 - protein, 15 aa, BK virus
LVGAIFICFKSRCYS

SEQ ID NO: 37444 - protein, 15 aa, BK virus
VGAIFICFKSRCYSP

SEQ ID NO: 37445 - protein, 15 aa, BK virus
GAIFICFKSRCYSPV

SEQ ID NO: 37446 - protein, 15 aa, BK virus
AIFICFKSRCYSPVQ

SEQ ID NO: 37447 - protein, 15 aa, BK virus
IFICFKSRCYSPVQA

SEQ ID NO: 37448 - protein, 15 aa, BK virus
RQHPLRSSSLISTSW

SEQ ID NO: 37449 - protein, 15 aa, BK virus
QHPLRSSSLISTSWG

SEQ ID NO: 37450 - protein, 15 aa, BK virus
HPLRSSSLISTSWGN

SEQ ID NO: 37451 - protein, 15 aa, BK virus
PLRSSSLISTSWGNS

SEQ ID NO: 37452 - protein, 15 aa, BK virus
LRSSSLISTSWGNSF

SEQ ID NO: 37453 - protein, 15 aa, BK virus
RSSSLISTSWGNSFF

SEQ ID NO: 37454 - protein, 15 aa, BK virus
SSSLISTSWGNSFFY

SEQ ID NO: 37455 - protein, 15 aa, BK virus
SSLISTSWGNSFFYK

SEQ ID NO: 37456 - protein, 15 aa, BK virus
SLISTSWGNSFFYKL

SEQ ID NO: 37457 - protein, 15 aa, BK virus
LISTSWGNSFFYKLS

SEQ ID NO: 37458 - protein, 15 aa, BK virus
VHSLCNFFYTVSIIY

SEQ ID NO: 37459 - protein, 15 aa, BK virus
HSLCNFFYTVSIIYT

SEQ ID NO: 37460 - protein, 15 aa, BK virus
SLCNFFYTVSIIYTI

SEQ ID NO: 37461 - protein, 15 aa, BK virus
LCNFFYTVSIIYTIS

SEQ ID NO: 37462 - protein, 15 aa, BK virus
CNFFYTVSIIYTISM

SEQ ID NO: 37463 - protein, 15 aa, BK virus
NFFYTVSIIYTISMA

SEQ ID NO: 37464 - protein, 15 aa, BK virus
FFYTVSIIYTISMAK

SEQ ID NO: 37465 - protein, 15 aa, BK virus
FYTVSIIYTISMAKM

SEQ ID NO: 37466 - protein, 15 aa, BK virus
YTVSIIYTISMAKMY

SEQ ID NO: 37467 - protein, 15 aa, BK virus
TVSIIYTISMAKMYT

SEQ ID NO: 37468 - protein, 15 aa, BK virus
VSIIYTISMAKMYTG

SEQ ID NO: 37469 - protein, 15 aa, BK virus
SIIYTISMAKMYTGT

SEQ ID NO: 37470 - protein, 15 aa, BK virus
IIYTISMAKMYTGTF

SEQ ID NO: 37471 - protein, 15 aa, BK virus
IYTISMAKMYTGTFP

SEQ ID NO: 37472 - protein, 15 aa, BK virus
YTISMAKMYTGTFPF

SEQ ID NO: 37473 - protein, 15 aa, BK virus
TISMAKMYTGTFPFS

SEQ ID NO: 37474 - protein, 15 aa, BK virus
ISMAKMYTGTFPFSY

SEQ ID NO: 37475 - protein, 15 aa, BK virus
SMAKMYTGTFPFSYL

SEQ ID NO: 37476 - protein, 15 aa, BK virus
MAKMYTGTFPFSYLS

SEQ ID NO: 37477 - protein, 15 aa, BK virus
AKMYTGTFPFSYLSN

SEQ ID NO: 37478 - protein, 15 aa, BK virus
KMYTGTFPFSYLSNH

SEQ ID NO: 37479 - protein, 15 aa, BK virus
GPNRGKIRIILLNII

SEQ ID NO: 37480 - protein, 15 aa, BK virus
PNRGKIRIILLNIII

SEQ ID NO: 37481 - protein, 15 aa, BK virus
NRGKIRIILLNIIIK

SEQ ID NO: 37482 - protein, 15 aa, BK virus
RGKIRIILLNIIIKV

SEQ ID NO: 37483 - protein, 15 aa, BK virus
GKIRIILLNIIIKVY

SEQ ID NO: 37484 - protein, 15 aa, BK virus
KIRIILLNIIIKVYR

SEQ ID NO: 37485 - protein, 15 aa, BK virus
IRIILLNIIIKVYRG

SEQ ID NO: 37486 - protein, 15 aa, BK virus
RIILLNIIIKVYRGI

SEQ ID NO: 37487 - protein, 15 aa, BK virus
IILLNIIIKVYRGIY

SEQ ID NO: 37488 - protein, 15 aa, BK virus
ILLNIIIKVYRGIYN

SEQ ID NO: 37489 - protein, 15 aa, BK virus
LLNIIIKVYRGIYNC

SEQ ID NO: 37490 - protein, 15 aa, BK virus
LNIIIKVYRGIYNCP

SEQ ID NO: 37491 - protein, 15 aa, BK virus
NIIIKVYRGIYNCPG

SEQ ID NO: 37492 - protein, 15 aa, BK virus
IIIKVYRGIYNCPGS

SEQ ID NO: 37493 - protein, 15 aa, BK virus
IIKVYRGIYNCPGSF

SEQ ID NO: 37494 - protein, 15 aa, BK virus
IKVYRGIYNCPGSFL

SEQ ID NO: 37495 - protein, 15 aa, BK virus
KVYRGIYNCPGSFLQ

SEQ ID NO: 37496 - protein, 15 aa, BK virus
VYRGIYNCPGSFLQK

SEQ ID NO: 37497 - protein, 15 aa, BK virus
YRGIYNCPGSFLQKS

SEQ ID NO: 37498 - protein, 15 aa, BK virus
RGIYNCPGSFLQKSS

SEQ ID NO: 37499 - protein, 15 aa, BK virus
GIYNCPGSFLQKSSQ

SEQ ID NO: 37500 - protein, 15 aa, BK virus
IYNCPGSFLQKSSQG

SEQ ID NO: 37501 - protein, 15 aa, BK virus
YNCPGSFLQKSSQGV

SEQ ID NO: 37502 - protein, 15 aa, BK virus
NCPGSFLQKSSQGVS

SEQ ID NO: 37503 - protein, 15 aa, BK virus
CPGSFLQKSSQGVSK

SEQ ID NO: 37504 - protein, 15 aa, BK virus
PGSFLQKSSQGVSKK

SEQ ID NO: 37505 - protein, 15 aa, BK virus
GSFLQKSSQGVSKKS

SEQ ID NO: 37506 - protein, 15 aa, BK virus
SFLQKSSQGVSKKSF

SEQ ID NO: 37507 - protein, 15 aa, BK virus
FLQKSSQGVSKKSFC

SEQ ID NO: 37508 - protein, 15 aa, BK virus
LQKSSQGVSKKSFCS

SEQ ID NO: 37509 - protein, 15 aa, BK virus
QKSSQGVSKKSFCSS

SEQ ID NO: 37510 - protein, 15 aa, BK virus
KSSQGVSKKSFCSSL

SEQ ID NO: 37511 - protein, 15 aa, BK virus
SSQGVSKKSFCSSLQ

SEQ ID NO: 37512 - protein, 15 aa, BK virus
SQGVSKKSFCSSLQF

SEQ ID NO: 37513 - protein, 15 aa, BK virus
QGVSKKSFCSSLQFL

SEQ ID NO: 37514 - protein, 15 aa, BK virus
GYRRYIIPNNMPQSL

SEQ ID NO: 37515 - protein, 15 aa, BK virus
YRRYIIPNNMPQSLG

SEQ ID NO: 37516 - protein, 15 aa, BK virus
RRYIIPNNMPQSLGN

SEQ ID NO: 37517 - protein, 15 aa, BK virus
RYIIPNNMPQSLGNS

SEQ ID NO: 37518 - protein, 15 aa, BK virus
YIIPNNMPQSLGNSS

SEQ ID NO: 37519 - protein, 15 aa, BK virus
IIPNNMPQSLGNSSK

SEQ ID NO: 37520 - protein, 15 aa, BK virus
IPNNMPQSLGNSSKQ

SEQ ID NO: 37521 - protein, 15 aa, BK virus
PNNMPQSLGNSSKQR

SEQ ID NO: 37522 - protein, 15 aa, BK virus
NNMPQSLGNSSKQRR

SEQ ID NO: 37523 - protein, 15 aa, BK virus
NMPQSLGNSSKQRRT

SEQ ID NO: 37524 - protein, 15 aa, BK virus
MPQSLGNSSKQRRTP

SEQ ID NO: 37525 - protein, 15 aa, BK virus
PQSLGNSSKQRRTPM

SEQ ID NO: 37526 - protein, 15 aa, BK virus
QSLGNSSKQRRTPMP

SEQ ID NO: 37527 - protein, 15 aa, BK virus
SLGNSSKQRRTPMPR

SEQ ID NO: 37528 - protein, 15 aa, BK virus
LGNSSKQRRTPMPRI

SEQ ID NO: 37529 - protein, 15 aa, BK virus
GNSSKQRRTPMPRIK

SEQ ID NO: 37530 - protein, 15 aa, BK virus
NSSKQRRTPMPRIKV

SEQ ID NO: 37531 - protein, 15 aa, BK virus
SSKQRRTPMPRIKVL

SEQ ID NO: 37532 - protein, 15 aa, BK virus
SKQRRTPMPRIKVLN

SEQ ID NO: 37533 - protein, 15 aa, BK virus
KQRRTPMPRIKVLNI

SEQ ID NO: 37534 - protein, 15 aa, BK virus
QRRTPMPRIKVLNII

SEQ ID NO: 37535 - protein, 15 aa, BK virus
RRTPMPRIKVLNIIN

SEQ ID NO: 37536 - protein, 15 aa, BK virus
RTPMPRIKVLNIINK

SEQ ID NO: 37537 - protein, 15 aa, BK virus
TPMPRIKVLNIINKS

SEQ ID NO: 37538 - protein, 15 aa, BK virus
PMPRIKVLNIINKSI

SEQ ID NO: 37539 - protein, 15 aa, BK virus
MPRIKVLNIINKSIY

SEQ ID NO: 37540 - protein, 15 aa, BK virus
PRIKVLNIINKSIYT

SEQ ID NO: 37541 - protein, 15 aa, BK virus
RIKVLNIINKSIYTR

SEQ ID NO: 37542 - protein, 15 aa, BK virus
IKVLNIINKSIYTRK

SEQ ID NO: 37543 - protein, 15 aa, BK virus
KVLNIINKSIYTRKQ

SEQ ID NO: 37544 - protein, 15 aa, BK virus
VLNIINKSIYTRKQN

SEQ ID NO: 37545 - protein, 15 aa, BK virus
LNIINKSIYTRKQNI

SEQ ID NO: 37546 - protein, 15 aa, BK virus
NIINKSIYTRKQNII

SEQ ID NO: 37547 - protein, 15 aa, BK virus
IINKSIYTRKQNIIV

SEQ ID NO: 37548 - protein, 15 aa, BK virus
INKSIYTRKQNIIVL

SEQ ID NO: 37549 - protein, 15 aa, BK virus
NKSIYTRKQNIIVLI

SEQ ID NO: 37550 - protein, 15 aa, BK virus
KSIYTRKQNIIVLIW

SEQ ID NO: 37551 - protein, 15 aa, BK virus
SIYTRKQNIIVLIWV

SEQ ID NO: 37552 - protein, 15 aa, BK virus
IYTRKQNIIVLIWVK

SEQ ID NO: 37553 - protein, 15 aa, BK virus
YTRKQNIIVLIWVKQ

SEQ ID NO: 37554 - protein, 15 aa, BK virus
TRKQNIIVLIWVKQF

SEQ ID NO: 37555 - protein, 15 aa, BK virus
RKQNIIVLIWVKQFQ

SEQ ID NO: 37556 - protein, 15 aa, BK virus
KQNIIVLIWVKQFQS

SEQ ID NO: 37557 - protein, 15 aa, BK virus
QNIIVLIWVKQFQSH

SEQ ID NO: 37558 - protein, 15 aa, BK virus
NIIVLIWVKQFQSHA

SEQ ID NO: 37559 - protein, 15 aa, BK virus
LLIEAYSGNFVIPII

SEQ ID NO: 37560 - protein, 15 aa, BK virus
LIEAYSGNFVIPIIK

SEQ ID NO: 37561 - protein, 15 aa, BK virus
IEAYSGNFVIPIIKE

SEQ ID NO: 37562 - protein, 15 aa, BK virus
EAYSGNFVIPIIKEL

SEQ ID NO: 37563 - protein, 15 aa, BK virus
AYSGNFVIPIIKELI

SEQ ID NO: 37564 - protein, 15 aa, BK virus
YSGNFVIPIIKELIP

SEQ ID NO: 37565 - protein, 15 aa, BK virus
SGNFVIPIIKELIPY

SEQ ID NO: 37566 - protein, 15 aa, BK virus
GNFVIPIIKELIPYL

SEQ ID NO: 37567 - protein, 15 aa, BK virus
NFVIPIIKELIPYLS

SEQ ID NO: 37568 - protein, 15 aa, BK virus
SSKPSNSPRSTSNYS

SEQ ID NO: 37569 - protein, 15 aa, BK virus
SKPSNSPRSTSNYSI

SEQ ID NO: 37570 - protein, 15 aa, BK virus
KPSNSPRSTSNYSIC

SEQ ID NO: 37571 - protein, 15 aa, BK virus
PSNSPRSTSNYSICL

SEQ ID NO: 37572 - protein, 15 aa, BK virus
SNSPRSTSNYSICLR

SEQ ID NO: 37573 - protein, 15 aa, BK virus
NSPRSTSNYSICLRS

SEQ ID NO: 37574 - protein, 15 aa, BK virus
GTCYALYSSKGCNLN

SEQ ID NO: 37575 - protein, 15 aa, BK virus
TCYALYSSKGCNLNF

SEQ ID NO: 37576 - protein, 15 aa, BK virus
CYALYSSKGCNLNFY

SEQ ID NO: 37577 - protein, 15 aa, BK virus
YALYSSKGCNLNFYS

SEQ ID NO: 37578 - protein, 15 aa, BK virus
ALYSSKGCNLNFYSS

SEQ ID NO: 37579 - protein, 15 aa, BK virus
LYSSKGCNLNFYSSS

SEQ ID NO: 37580 - protein, 15 aa, BK virus
YSSKGCNLNFYSSSS

SEQ ID NO: 37581 - protein, 15 aa, BK virus
SSKGCNLNFYSSSSL

SEQ ID NO: 37582 - protein, 15 aa, BK virus
SKGCNLNFYSSSSLP

SEQ ID NO: 37583 - protein, 15 aa, BK virus
KGCNLNFYSSSSLPS

SEQ ID NO: 37584 - protein, 15 aa, BK virus
GCNLNFYSSSSLPSS

SEQ ID NO: 37585 - protein, 15 aa, BK virus
CNLNFYSSSSLPSSN

SEQ ID NO: 37586 - protein, 15 aa, BK virus
NLNFYSSSSLPSSNF

SEQ ID NO: 37587 - protein, 15 aa, BK virus
LNFYSSSSLPSSNFS

SEQ ID NO: 37588 - protein, 15 aa, BK virus
NFYSSSSLPSSNFSH

SEQ ID NO: 37589 - protein, 15 aa, BK virus
SSTHEPGNTKKKGLL

SEQ ID NO: 37590 - protein, 15 aa, BK virus
STHEPGNTKKKGLLT

SEQ ID NO: 37591 - protein, 15 aa, BK virus
ESFTESFTAGKAVVL

SEQ ID NO: 37592 - protein, 15 aa, BK virus
SFTESFTAGKAVVLL

SEQ ID NO: 37593 - protein, 15 aa, BK virus
FTESFTAGKAVVLLF

SEQ ID NO: 37594 - protein, 15 aa, BK virus
TESFTAGKAVVLLFF

SEQ ID NO: 37595 - protein, 15 aa, BK virus
ESFTAGKAVVLLFFP

SEQ ID NO: 37596 - protein, 15 aa, BK virus
SFTAGKAVVLLFFPS

SEQ ID NO: 37597 - protein, 15 aa, BK virus
FTAGKAVVLLFFPST

SEQ ID NO: 37598 - protein, 15 aa, BK virus
TAGKAVVLLFFPSTL

SEQ ID NO: 37599 - protein, 15 aa, BK virus
AGKAVVLLFFPSTLS

SEQ ID NO: 37600 - protein, 15 aa, BK virus
GKAVVLLFFPSTLSS

SEQ ID NO: 37601 - protein, 15 aa, BK virus
KAVVLLFFPSTLSSP

SEQ ID NO: 37602 - protein, 15 aa, BK virus
AVVLLFFPSTLSSPL

SEQ ID NO: 37603 - protein, 15 aa, BK virus
VVLLFFPSTLSSPLQ

SEQ ID NO: 37604 - protein, 15 aa, BK virus
VLLFFPSTLSSPLQN

SEQ ID NO: 37605 - protein, 15 aa, BK virus
LLFFPSTLSSPLQNS

SEQ ID NO: 37606 - protein, 15 aa, BK virus
LFFPSTLSSPLQNSS

SEQ ID NO: 37607 - protein, 15 aa, BK virus
FFPSTLSSPLQNSSK

SEQ ID NO: 37608 - protein, 15 aa, BK virus
FPSTLSSPLQNSSKS

SEQ ID NO: 37609 - protein, 15 aa, BK virus
PSTLSSPLQNSSKSS

SEQ ID NO: 37610 - protein, 15 aa, BK virus
STLSSPLQNSSKSSK

SEQ ID NO: 37611 - protein, 15 aa, BK virus
TLSSPLQNSSKSSKI

SEQ ID NO: 37612 - protein, 15 aa, BK virus
LSSPLQNSSKSSKIK

SEQ ID NO: 37613 - protein, 15 aa, BK virus
SSPLQNSSKSSKIKI

SEQ ID NO: 37614 - protein, 15 aa, BK virus
SPLQNSSKSSKIKIK

SEQ ID NO: 37615 - protein, 15 aa, BK virus
PLQNSSKSSKIKIKI

SEQ ID NO: 37616 - protein, 15 aa, BK virus
LQNSSKSSKIKIKIL

SEQ ID NO: 37617 - protein, 15 aa, BK virus
ALFFVPVQVLPTFTE

SEQ ID NO: 37618 - protein, 15 aa, BK virus
LFFVPVQVLPTFTEA

SEQ ID NO: 37619 - protein, 15 aa, BK virus
FFVPVQVLPTFTEAC

SEQ ID NO: 37620 - protein, 15 aa, BK virus
FVPVQVLPTFTEACR

SEQ ID NO: 37621 - protein, 15 aa, BK virus
VPVQVLPTFTEACRD

SEQ ID NO: 37622 - protein, 15 aa, BK virus
PVQVLPTFTEACRDS

SEQ ID NO: 37623 - protein, 15 aa, BK virus
VQVLPTFTEACRDSW

SEQ ID NO: 37624 - protein, 15 aa, BK virus
QVLPTFTEACRDSWR

SEQ ID NO: 37625 - protein, 15 aa, BK virus
VLPTFTEACRDSWRR

SEQ ID NO: 37626 - protein, 15 aa, BK virus
LPTFTEACRDSWRRT

SEQ ID NO: 37627 - protein, 15 aa, BK virus
PTFTEACRDSWRRTM

SEQ ID NO: 37628 - protein, 15 aa, BK virus
TFTEACRDSWRRTMA

SEQ ID NO: 37629 - protein, 15 aa, BK virus
FTEACRDSWRRTMAF

SEQ ID NO: 37630 - protein, 15 aa, BK virus
TEACRDSWRRTMAFV

SEQ ID NO: 37631 - protein, 15 aa, BK virus
EACRDSWRRTMAFVQ

SEQ ID NO: 37632 - protein, 15 aa, BK virus
ACRDSWRRTMAFVQF

SEQ ID NO: 37633 - protein, 15 aa, BK virus
CRDSWRRTMAFVQFN

SEQ ID NO: 37634 - protein, 15 aa, BK virus
RDSWRRTMAFVQFNW

SEQ ID NO: 37635 - protein, 15 aa, BK virus
DSWRRTMAFVQFNWG

SEQ ID NO: 37636 - protein, 15 aa, BK virus
SWRRTMAFVQFNWGQ

SEQ ID NO: 37637 - protein, 15 aa, BK virus
WRRTMAFVQFNWGQG

SEQ ID NO: 37638 - protein, 15 aa, BK virus
RRTMAFVQFNWGQGQ

SEQ ID NO: 37639 - protein, 15 aa, BK virus
RTMAFVQFNWGQGQD

SEQ ID NO: 37640 - protein, 15 aa, BK virus
TMAFVQFNWGQGQDS

SEQ ID NO: 37641 - protein, 15 aa, BK virus
ARKTCLSCTFLPEVM

SEQ ID NO: 37642 - protein, 15 aa, BK virus
RKTCLSCTFLPEVMV

SEQ ID NO: 37643 - protein, 15 aa, BK virus
KTCLSCTFLPEVMVW

SEQ ID NO: 37644 - protein, 15 aa, BK virus
TCLSCTFLPEVMVWL

SEQ ID NO: 37645 - protein, 15 aa, BK virus
CLSCTFLPEVMVWLH

SEQ ID NO: 37646 - protein, 15 aa, BK virus
LSCTFLPEVMVWLHS

SEQ ID NO: 37647 - protein, 15 aa, BK virus
SCTFLPEVMVWLHSM

SEQ ID NO: 37648 - protein, 15 aa, BK virus
CTFLPEVMVWLHSMG

SEQ ID NO: 37649 - protein, 15 aa, BK virus
TFLPEVMVWLHSMGK

SEQ ID NO: 37650 - protein, 15 aa, BK virus
FLPEVMVWLHSMGKQ

SEQ ID NO: 37651 - protein, 15 aa, BK virus
LPEVMVWLHSMGKQL

SEQ ID NO: 37652 - protein, 15 aa, BK virus
PEVMVWLHSMGKQLL

SEQ ID NO: 37653 - protein, 15 aa, BK virus
EVMVWLHSMGKQLLP

SEQ ID NO: 37654 - protein, 15 aa, BK virus
VMVWLHSMGKQLLPV

SEQ ID NO: 37655 - protein, 15 aa, BK virus
MVWLHSMGKQLLPVS

SEQ ID NO: 37656 - protein, 15 aa, BK virus
VWLHSMGKQLLPVSH

SEQ ID NO: 37657 - protein, 15 aa, BK virus
WLHSMGKQLLPVSHA

SEQ ID NO: 37658 - protein, 15 aa, BK virus
LHSMGKQLLPVSHAL

SEQ ID NO: 37659 - protein, 15 aa, BK virus
HSMGKQLLPVSHALS

SEQ ID NO: 37660 - protein, 15 aa, BK virus
SMGKQLLPVSHALSF

SEQ ID NO: 37661 - protein, 15 aa, BK virus
MGKQLLPVSHALSFL

SEQ ID NO: 37662 - protein, 15 aa, BK virus
GKQLLPVSHALSFLR

SEQ ID NO: 37663 - protein, 15 aa, BK virus
KQLLPVSHALSFLRS

SEQ ID NO: 37664 - protein, 15 aa, BK virus
QLLPVSHALSFLRSW

SEQ ID NO: 37665 - protein, 15 aa, BK virus
LLPVSHALSFLRSWF

SEQ ID NO: 37666 - protein, 15 aa, BK virus
LPVSHALSFLRSWFG

SEQ ID NO: 37667 - protein, 15 aa, BK virus
PVSHALSFLRSWFGC

SEQ ID NO: 37668 - protein, 15 aa, BK virus
VSHALSFLRSWFGCI

SEQ ID NO: 37669 - protein, 15 aa, BK virus
SHALSFLRSWFGCIP

SEQ ID NO: 37670 - protein, 15 aa, BK virus
HALSFLRSWFGCIPL

SEQ ID NO: 37671 - protein, 15 aa, BK virus
GLAKLFGEIPILLQF

SEQ ID NO: 37672 - protein, 15 aa, BK virus
LAKLFGEIPILLQFL

SEQ ID NO: 37673 - protein, 15 aa, BK virus
AKLFGEIPILLQFLQ

SEQ ID NO: 37674 - protein, 16 aa, BK virus
MDKVLNREESMELMDL

SEQ ID NO: 37675 - protein, 16 aa, BK virus
DKVLNREESMELMDLL

SEQ ID NO: 37676 - protein, 16 aa, BK virus
KVLNREESMELMDLLG

SEQ ID NO: 37677 - protein, 16 aa, BK virus
VLNREESMELMDLLGL

SEQ ID NO: 37678 - protein, 16 aa, BK virus
LNREESMELMDLLGLE

SEQ ID NO: 37679 - protein, 16 aa, BK virus
NREESMELMDLLGLER

SEQ ID NO: 37680 - protein, 16 aa, BK virus
REESMELMDLLGLERA

SEQ ID NO: 37681 - protein, 16 aa, BK virus
EESMELMDLLGLERAA

SEQ ID NO: 37682 - protein, 16 aa, BK virus
ESMELMDLLGLERAAW

SEQ ID NO: 37683 - protein, 16 aa, BK virus
SMELMDLLGLERAAWG

SEQ ID NO: 37684 - protein, 16 aa, BK virus
MELMDLLGLERAAWGN

SEQ ID NO: 37685 - protein, 16 aa, BK virus
ELMDLLGLERAAWGNL

SEQ ID NO: 37686 - protein, 16 aa, BK virus
LMDLLGLERAAWGNLP

SEQ ID NO: 37687 - protein, 16 aa, BK virus
MDLLGLERAAWGNLPL

SEQ ID NO: 37688 - protein, 16 aa, BK virus
DLLGLERAAWGNLPLM

SEQ ID NO: 37689 - protein, 16 aa, BK virus
LLGLERAAWGNLPLMR

SEQ ID NO: 37690 - protein, 16 aa, BK virus
LGLERAAWGNLPLMRK

SEQ ID NO: 37691 - protein, 16 aa, BK virus
GLERAAWGNLPLMRKA

SEQ ID NO: 37692 - protein, 16 aa, BK virus
LERAAWGNLPLMRKAY

SEQ ID NO: 37693 - protein, 16 aa, BK virus
ERAAWGNLPLMRKAYL

SEQ ID NO: 37694 - protein, 16 aa, BK virus
RAAWGNLPLMRKAYLR

SEQ ID NO: 37695 - protein, 16 aa, BK virus
AAWGNLPLMRKAYLRK

SEQ ID NO: 37696 - protein, 16 aa, BK virus
AWGNLPLMRKAYLRKC

SEQ ID NO: 37697 - protein, 16 aa, BK virus
WGNLPLMRKAYLRKCK

SEQ ID NO: 37698 - protein, 16 aa, BK virus
GNLPLMRKAYLRKCKE

SEQ ID NO: 37699 - protein, 16 aa, BK virus
NLPLMRKAYLRKCKEF

SEQ ID NO: 37700 - protein, 16 aa, BK virus
LPLMRKAYLRKCKEFH

SEQ ID NO: 37701 - protein, 16 aa, BK virus
PLMRKAYLRKCKEFHP

SEQ ID NO: 37702 - protein, 16 aa, BK virus
LMRKAYLRKCKEFHPD

SEQ ID NO: 37703 - protein, 16 aa, BK virus
MRKAYLRKCKEFHPDK

SEQ ID NO: 37704 - protein, 16 aa, BK virus
RKAYLRKCKEFHPDKG

SEQ ID NO: 37705 - protein, 16 aa, BK virus
KAYLRKCKEFHPDKGG

SEQ ID NO: 37706 - protein, 16 aa, BK virus
AYLRKCKEFHPDKGGD

SEQ ID NO: 37707 - protein, 16 aa, BK virus
YLRKCKEFHPDKGGDE

SEQ ID NO: 37708 - protein, 16 aa, BK virus
LRKCKEFHPDKGGDED

SEQ ID NO: 37709 - protein, 16 aa, BK virus
RKCKEFHPDKGGDEDK

SEQ ID NO: 37710 - protein, 16 aa, BK virus
KCKEFHPDKGGDEDKM

SEQ ID NO: 37711 - protein, 16 aa, BK virus
CKEFHPDKGGDEDKMK

SEQ ID NO: 37712 - protein, 16 aa, BK virus
KEFHPDKGGDEDKMKR

SEQ ID NO: 37713 - protein, 16 aa, BK virus
EFHPDKGGDEDKMKRM

SEQ ID NO: 37714 - protein, 16 aa, BK virus
FHPDKGGDEDKMKRMN

SEQ ID NO: 37715 - protein, 16 aa, BK virus
HPDKGGDEDKMKRMNT

SEQ ID NO: 37716 - protein, 16 aa, BK virus
PDKGGDEDKMKRMNTL

SEQ ID NO: 37717 - protein, 16 aa, BK virus
DKGGDEDKMKRMNTLY

SEQ ID NO: 37718 - protein, 16 aa, BK virus
KGGDEDKMKRMNTLYK

SEQ ID NO: 37719 - protein, 16 aa, BK virus
GGDEDKMKRMNTLYKK

SEQ ID NO: 37720 - protein, 16 aa, BK virus
GDEDKMKRMNTLYKKM

SEQ ID NO: 37721 - protein, 16 aa, BK virus
DEDKMKRMNTLYKKME

SEQ ID NO: 37722 - protein, 16 aa, BK virus
EDKMKRMNTLYKKMEQ

SEQ ID NO: 37723 - protein, 16 aa, BK virus
DKMKRMNTLYKKMEQD

SEQ ID NO: 37724 - protein, 16 aa, BK virus
KMKRMNTLYKKMEQDV

SEQ ID NO: 37725 - protein, 16 aa, BK virus
MKRMNTLYKKMEQDVK

SEQ ID NO: 37726 - protein, 16 aa, BK virus
KRMNTLYKKMEQDVKV

SEQ ID NO: 37727 - protein, 16 aa, BK virus
RMNTLYKKMEQDVKVA

SEQ ID NO: 37728 - protein, 16 aa, BK virus
MNTLYKKMEQDVKVAH

SEQ ID NO: 37729 - protein, 16 aa, BK virus
NTLYKKMEQDVKVAHQ

SEQ ID NO: 37730 - protein, 16 aa, BK virus
TLYKKMEQDVKVAHQP

SEQ ID NO: 37731 - protein, 16 aa, BK virus
LYKKMEQDVKVAHQPD

SEQ ID NO: 37732 - protein, 16 aa, BK virus
YKKMEQDVKVAHQPDF

SEQ ID NO: 37733 - protein, 16 aa, BK virus
KKMEQDVKVAHQPDFG

SEQ ID NO: 37734 - protein, 16 aa, BK virus
KMEQDVKVAHQPDFGT

SEQ ID NO: 37735 - protein, 16 aa, BK virus
MEQDVKVAHQPDFGTW

SEQ ID NO: 37736 - protein, 16 aa, BK virus
EQDVKVAHQPDFGTWS

SEQ ID NO: 37737 - protein, 16 aa, BK virus
QDVKVAHQPDFGTWSS

SEQ ID NO: 37738 - protein, 16 aa, BK virus
DVKVAHQPDFGTWSSS

SEQ ID NO: 37739 - protein, 16 aa, BK virus
VKVAHQPDFGTWSSSE

SEQ ID NO: 37740 - protein, 16 aa, BK virus
KVAHQPDFGTWSSSEV

SEQ ID NO: 37741 - protein, 16 aa, BK virus
VAHQPDFGTWSSSEVC

SEQ ID NO: 37742 - protein, 16 aa, BK virus
AHQPDFGTWSSSEVCA

SEQ ID NO: 37743 - protein, 16 aa, BK virus
HQPDFGTWSSSEVCAD

SEQ ID NO: 37744 - protein, 16 aa, BK virus
QPDFGTWSSSEVCADF

SEQ ID NO: 37745 - protein, 16 aa, BK virus
PDFGTWSSSEVCADFP

SEQ ID NO: 37746 - protein, 16 aa, BK virus
DFGTWSSSEVCADFPL

SEQ ID NO: 37747 - protein, 16 aa, BK virus
FGTWSSSEVCADFPLC

SEQ ID NO: 37748 - protein, 16 aa, BK virus
GTWSSSEVCADFPLCP

SEQ ID NO: 37749 - protein, 16 aa, BK virus
TWSSSEVCADFPLCPD

SEQ ID NO: 37750 - protein, 16 aa, BK virus
WSSSEVCADFPLCPDT

SEQ ID NO: 37751 - protein, 16 aa, BK virus
SSSEVCADFPLCPDTL

SEQ ID NO: 37752 - protein, 16 aa, BK virus
SSEVCADFPLCPDTLY

SEQ ID NO: 37753 - protein, 16 aa, BK virus
SEVCADFPLCPDTLYC

SEQ ID NO: 37754 - protein, 16 aa, BK virus
EVCADFPLCPDTLYCK

SEQ ID NO: 37755 - protein, 16 aa, BK virus
VCADFPLCPDTLYCKE

SEQ ID NO: 37756 - protein, 16 aa, BK virus
CADFPLCPDTLYCKEW

SEQ ID NO: 37757 - protein, 16 aa, BK virus
ADFPLCPDTLYCKEWP

SEQ ID NO: 37758 - protein, 16 aa, BK virus
DFPLCPDTLYCKEWPI

SEQ ID NO: 37759 - protein, 16 aa, BK virus
FPLCPDTLYCKEWPIC

SEQ ID NO: 37760 - protein, 16 aa, BK virus
PLCPDTLYCKEWPICS

SEQ ID NO: 37761 - protein, 16 aa, BK virus
LCPDTLYCKEWPICSK

SEQ ID NO: 37762 - protein, 16 aa, BK virus
CPDTLYCKEWPICSKK

SEQ ID NO: 37763 - protein, 16 aa, BK virus
PDTLYCKEWPICSKKP

SEQ ID NO: 37764 - protein, 16 aa, BK virus
DTLYCKEWPICSKKPS

SEQ ID NO: 37765 - protein, 16 aa, BK virus
TLYCKEWPICSKKPSV

SEQ ID NO: 37766 - protein, 16 aa, BK virus
LYCKEWPICSKKPSVH

SEQ ID NO: 37767 - protein, 16 aa, BK virus
YCKEWPICSKKPSVHC

SEQ ID NO: 37768 - protein, 16 aa, BK virus
CKEWPICSKKPSVHCP

SEQ ID NO: 37769 - protein, 16 aa, BK virus
KEWPICSKKPSVHCPC

SEQ ID NO: 37770 - protein, 16 aa, BK virus
EWPICSKKPSVHCPCM

SEQ ID NO: 37771 - protein, 16 aa, BK virus
WPICSKKPSVHCPCML

SEQ ID NO: 37772 - protein, 16 aa, BK virus
PICSKKPSVHCPCMLC

SEQ ID NO: 37773 - protein, 16 aa, BK virus
ICSKKPSVHCPCMLCQ

SEQ ID NO: 37774 - protein, 16 aa, BK virus
CSKKPSVHCPCMLCQL

SEQ ID NO: 37775 - protein, 16 aa, BK virus
SKKPSVHCPCMLCQLR

SEQ ID NO: 37776 - protein, 16 aa, BK virus
KKPSVHCPCMLCQLRL

SEQ ID NO: 37777 - protein, 16 aa, BK virus
KPSVHCPCMLCQLRLR

SEQ ID NO: 37778 - protein, 16 aa, BK virus
PSVHCPCMLCQLRLRH

SEQ ID NO: 37779 - protein, 16 aa, BK virus
SVHCPCMLCQLRLRHL

SEQ ID NO: 37780 - protein, 16 aa, BK virus
VHCPCMLCQLRLRHLN

SEQ ID NO: 37781 - protein, 16 aa, BK virus
HCPCMLCQLRLRHLNR

SEQ ID NO: 37782 - protein, 16 aa, BK virus
CPCMLCQLRLRHLNRK

SEQ ID NO: 37783 - protein, 16 aa, BK virus
PCMLCQLRLRHLNRKF

SEQ ID NO: 37784 - protein, 16 aa, BK virus
CMLCQLRLRHLNRKFL

SEQ ID NO: 37785 - protein, 16 aa, BK virus
MLCQLRLRHLNRKFLR

SEQ ID NO: 37786 - protein, 16 aa, BK virus
LCQLRLRHLNRKFLRK

SEQ ID NO: 37787 - protein, 16 aa, BK virus
CQLRLRHLNRKFLRKE

SEQ ID NO: 37788 - protein, 16 aa, BK virus
QLRLRHLNRKFLRKEP

SEQ ID NO: 37789 - protein, 16 aa, BK virus
LRLRHLNRKFLRKEPL

SEQ ID NO: 37790 - protein, 16 aa, BK virus
RLRHLNRKFLRKEPLV

SEQ ID NO: 37791 - protein, 16 aa, BK virus
LRHLNRKFLRKEPLVW

SEQ ID NO: 37792 - protein, 16 aa, BK virus
RHLNRKFLRKEPLVWI

SEQ ID NO: 37793 - protein, 16 aa, BK virus
HLNRKFLRKEPLVWID

SEQ ID NO: 37794 - protein, 16 aa, BK virus
LNRKFLRKEPLVWIDC

SEQ ID NO: 37795 - protein, 16 aa, BK virus
NRKFLRKEPLVWIDCY

SEQ ID NO: 37796 - protein, 16 aa, BK virus
RKFLRKEPLVWIDCYC

SEQ ID NO: 37797 - protein, 16 aa, BK virus
KFLRKEPLVWIDCYCI

SEQ ID NO: 37798 - protein, 16 aa, BK virus
FLRKEPLVWIDCYCID

SEQ ID NO: 37799 - protein, 16 aa, BK virus
LRKEPLVWIDCYCIDC

SEQ ID NO: 37800 - protein, 16 aa, BK virus
RKEPLVWIDCYCIDCF

SEQ ID NO: 37801 - protein, 16 aa, BK virus
KEPLVWIDCYCIDCFT

SEQ ID NO: 37802 - protein, 16 aa, BK virus
EPLVWIDCYCIDCFTQ

SEQ ID NO: 37803 - protein, 16 aa, BK virus
PLVWIDCYCIDCFTQW

SEQ ID NO: 37804 - protein, 16 aa, BK virus
LVWIDCYCIDCFTQWF

SEQ ID NO: 37805 - protein, 16 aa, BK virus
VWIDCYCIDCFTQWFG

SEQ ID NO: 37806 - protein, 16 aa, BK virus
WIDCYCIDCFTQWFGL

SEQ ID NO: 37807 - protein, 16 aa, BK virus
IDCYCIDCFTQWFGLD

SEQ ID NO: 37808 - protein, 16 aa, BK virus
DCYCIDCFTQWFGLDL

SEQ ID NO: 37809 - protein, 16 aa, BK virus
CYCIDCFTQWFGLDLT

SEQ ID NO: 37810 - protein, 16 aa, BK virus
YCIDCFTQWFGLDLTE

SEQ ID NO: 37811 - protein, 16 aa, BK virus
CIDCFTQWFGLDLTEE

SEQ ID NO: 37812 - protein, 16 aa, BK virus
IDCFTQWFGLDLTEET

SEQ ID NO: 37813 - protein, 16 aa, BK virus
DCFTQWFGLDLTEETL

SEQ ID NO: 37814 - protein, 16 aa, BK virus
CFTQWFGLDLTEETLQ

SEQ ID NO: 37815 - protein, 16 aa, BK virus
FTQWFGLDLTEETLQW

SEQ ID NO: 37816 - protein, 16 aa, BK virus
TQWFGLDLTEETLQWW

SEQ ID NO: 37817 - protein, 16 aa, BK virus
QWFGLDLTEETLQWWV

SEQ ID NO: 37818 - protein, 16 aa, BK virus
WFGLDLTEETLQWWVQ

SEQ ID NO: 37819 - protein, 16 aa, BK virus
FGLDLTEETLQWWVQI

SEQ ID NO: 37820 - protein, 16 aa, BK virus
GLDLTEETLQWWVQII

SEQ ID NO: 37821 - protein, 16 aa, BK virus
LDLTEETLQWWVQIIG

SEQ ID NO: 37822 - protein, 16 aa, BK virus
DLTEETLQWWVQIIGE

SEQ ID NO: 37823 - protein, 16 aa, BK virus
LTEETLQWWVQIIGET

SEQ ID NO: 37824 - protein, 16 aa, BK virus
TEETLQWWVQIIGETP

SEQ ID NO: 37825 - protein, 16 aa, BK virus
EETLQWWVQIIGETPF

SEQ ID NO: 37826 - protein, 16 aa, BK virus
ETLQWWVQIIGETPFR

SEQ ID NO: 37827 - protein, 16 aa, BK virus
TLQWWVQIIGETPFRD

SEQ ID NO: 37828 - protein, 16 aa, BK virus
LQWWVQIIGETPFRDL

SEQ ID NO: 37829 - protein, 16 aa, BK virus
QWWVQIIGETPFRDLK

SEQ ID NO: 37830 - protein, 16 aa, BK virus
WWVQIIGETPFRDLKL

SEQ ID NO: 37831 - protein, 16 aa, BK virus
KALSNYFFYRCQPMEQ

SEQ ID NO: 37832 - protein, 16 aa, BK virus
ALSNYFFYRCQPMEQK

SEQ ID NO: 37833 - protein, 16 aa, BK virus
LSNYFFYRCQPMEQKS

SEQ ID NO: 37834 - protein, 16 aa, BK virus
SNYFFYRCQPMEQKSG

SEQ ID NO: 37835 - protein, 16 aa, BK virus
NYFFYRCQPMEQKSGS

SEQ ID NO: 37836 - protein, 16 aa, BK virus
YFFYRCQPMEQKSGSP

SEQ ID NO: 37837 - protein, 16 aa, BK virus
FFYRCQPMEQKSGSPG

SEQ ID NO: 37838 - protein, 16 aa, BK virus
FYRCQPMEQKSGSPGG

SEQ ID NO: 37839 - protein, 16 aa, BK virus
YRCQPMEQKSGSPGGV

SEQ ID NO: 37840 - protein, 16 aa, BK virus
RCQPMEQKSGSPGGVP

SEQ ID NO: 37841 - protein, 16 aa, BK virus
CQPMEQKSGSPGGVPL

SEQ ID NO: 37842 - protein, 16 aa, BK virus
QPMEQKSGSPGGVPLM

SEQ ID NO: 37843 - protein, 16 aa, BK virus
PMEQKSGSPGGVPLMK

SEQ ID NO: 37844 - protein, 16 aa, BK virus
MEQKSGSPGGVPLMKN

SEQ ID NO: 37845 - protein, 16 aa, BK virus
EQKSGSPGGVPLMKNG

SEQ ID NO: 37846 - protein, 16 aa, BK virus
QKSGSPGGVPLMKNGM

SEQ ID NO: 37847 - protein, 16 aa, BK virus
KSGSPGGVPLMKNGMK

SEQ ID NO: 37848 - protein, 16 aa, BK virus
SGSPGGVPLMKNGMKI

SEQ ID NO: 37849 - protein, 16 aa, BK virus
GSPGGVPLMKNGMKIY

SEQ ID NO: 37850 - protein, 16 aa, BK virus
SPGGVPLMKNGMKIYF

SEQ ID NO: 37851 - protein, 16 aa, BK virus
PGGVPLMKNGMKIYFA

SEQ ID NO: 37852 - protein, 16 aa, BK virus
GGVPLMKNGMKIYFAM

SEQ ID NO: 37853 - protein, 16 aa, BK virus
GVPLMKNGMKIYFAMK

SEQ ID NO: 37854 - protein, 16 aa, BK virus
VPLMKNGMKIYFAMKI

SEQ ID NO: 37855 - protein, 16 aa, BK virus
PLMKNGMKIYFAMKIC

SEQ ID NO: 37856 - protein, 16 aa, BK virus
LMKNGMKIYFAMKICL

SEQ ID NO: 37857 - protein, 16 aa, BK virus
MKNGMKIYFAMKICLP

SEQ ID NO: 37858 - protein, 16 aa, BK virus
KNGMKIYFAMKICLPV

SEQ ID NO: 37859 - protein, 16 aa, BK virus
NGMKIYFAMKICLPVM

SEQ ID NO: 37860 - protein, 16 aa, BK virus
GMKIYFAMKICLPVMK

SEQ ID NO: 37861 - protein, 16 aa, BK virus
MKIYFAMKICLPVMKK

SEQ ID NO: 37862 - protein, 16 aa, BK virus
KIYFAMKICLPVMKKQ

SEQ ID NO: 37863 - protein, 16 aa, BK virus
IYFAMKICLPVMKKQQ

SEQ ID NO: 37864 - protein, 16 aa, BK virus
YFAMKICLPVMKKQQQ

SEQ ID NO: 37865 - protein, 16 aa, BK virus
FAMKICLPVMKKQQQI

SEQ ID NO: 37866 - protein, 16 aa, BK virus
AMKICLPVMKKQQQIL

SEQ ID NO: 37867 - protein, 16 aa, BK virus
MKICLPVMKKQQQILN

SEQ ID NO: 37868 - protein, 16 aa, BK virus
KICLPVMKKQQQILNT

SEQ ID NO: 37869 - protein, 16 aa, BK virus
ICLPVMKKQQQILNTQ

SEQ ID NO: 37870 - protein, 16 aa, BK virus
CLPVMKKQQQILNTQH

SEQ ID NO: 37871 - protein, 16 aa, BK virus
LPVMKKQQQILNTQHH

SEQ ID NO: 37872 - protein, 16 aa, BK virus
PVMKKQQQILNTQHHP

SEQ ID NO: 37873 - protein, 16 aa, BK virus
VMKKQQQILNTQHHPK

SEQ ID NO: 37874 - protein, 16 aa, BK virus
MKKQQQILNTQHHPKK

SEQ ID NO: 37875 - protein, 16 aa, BK virus
KKQQQILNTQHHPKKK

SEQ ID NO: 37876 - protein, 16 aa, BK virus
KQQQILNTQHHPKKKE

SEQ ID NO: 37877 - protein, 16 aa, BK virus
QQQILNTQHHPKKKER

SEQ ID NO: 37878 - protein, 16 aa, BK virus
KTLKTFPLIYTSFLVK

SEQ ID NO: 37879 - protein, 16 aa, BK virus
TLKTFPLIYTSFLVKL

SEQ ID NO: 37880 - protein, 16 aa, BK virus
LKTFPLIYTSFLVKLY

SEQ ID NO: 37881 - protein, 16 aa, BK virus
KTFPLIYTSFLVKLYL

SEQ ID NO: 37882 - protein, 16 aa, BK virus
TFPLIYTSFLVKLYLV

SEQ ID NO: 37883 - protein, 16 aa, BK virus
FPLIYTSFLVKLYLVI

SEQ ID NO: 37884 - protein, 16 aa, BK virus
PLIYTSFLVKLYLVIE

SEQ ID NO: 37885 - protein, 16 aa, BK virus
LIYTSFLVKLYLVIEP

SEQ ID NO: 37886 - protein, 16 aa, BK virus
IYTSFLVKLYLVIEPL

SEQ ID NO: 37887 - protein, 16 aa, BK virus
YTSFLVKLYLVIEPLP

SEQ ID NO: 37888 - protein, 16 aa, BK virus
TSFLVKLYLVIEPLPA

SEQ ID NO: 37889 - protein, 16 aa, BK virus
SFLVKLYLVIEPLPAL

SEQ ID NO: 37890 - protein, 16 aa, BK virus
FLVKLYLVIEPLPALL

SEQ ID NO: 37891 - protein, 16 aa, BK virus
LVKLYLVIEPLPALLC

SEQ ID NO: 37892 - protein, 16 aa, BK virus
VKLYLVIEPLPALLCI

SEQ ID NO: 37893 - protein, 16 aa, BK virus
KLYLVIEPLPALLCIL

SEQ ID NO: 37894 - protein, 16 aa, BK virus
LYLVIEPLPALLCILL

SEQ ID NO: 37895 - protein, 16 aa, BK virus
YLVIEPLPALLCILLK

SEQ ID NO: 37896 - protein, 16 aa, BK virus
LVIEPLPALLCILLKK

SEQ ID NO: 37897 - protein, 16 aa, BK virus
VIEPLPALLCILLKKK

SEQ ID NO: 37898 - protein, 16 aa, BK virus
IEPLPALLCILLKKKL

SEQ ID NO: 37899 - protein, 16 aa, BK virus
EPLPALLCILLKKKLK

SEQ ID NO: 37900 - protein, 16 aa, BK virus
PLPALLCILLKKKLKF

SEQ ID NO: 37901 - protein, 16 aa, BK virus
LPALLCILLKKKLKFC

SEQ ID NO: 37902 - protein, 16 aa, BK virus
PALLCILLKKKLKFCI

SEQ ID NO: 37903 - protein, 16 aa, BK virus
ALLCILLKKKLKFCIK

SEQ ID NO: 37904 - protein, 16 aa, BK virus
LLCILLKKKLKFCIKN

SEQ ID NO: 37905 - protein, 16 aa, BK virus
LCILLKKKLKFCIKNL

SEQ ID NO: 37906 - protein, 16 aa, BK virus
CILLKKKLKFCIKNLW

SEQ ID NO: 37907 - protein, 16 aa, BK virus
ILLKKKLKFCIKNLWK

SEQ ID NO: 37908 - protein, 16 aa, BK virus
LLKKKLKFCIKNLWKN

SEQ ID NO: 37909 - protein, 16 aa, BK virus
LKKKLKFCIKNLWKNI

SEQ ID NO: 37910 - protein, 16 aa, BK virus
KKKLKFCIKNLWKNIL

SEQ ID NO: 37911 - protein, 16 aa, BK virus
LLLVDTCVLGIILYSF

SEQ ID NO: 37912 - protein, 16 aa, BK virus
LHIDIEFLQLIISVKS

SEQ ID NO: 37913 - protein, 16 aa, BK virus
HIDIEFLQLIISVKSC

SEQ ID NO: 37914 - protein, 16 aa, BK virus
IDIEFLQLIISVKSCV

SEQ ID NO: 37915 - protein, 16 aa, BK virus
DIEFLQLIISVKSCVP

SEQ ID NO: 37916 - protein, 16 aa, BK virus
IEFLQLIISVKSCVPL

SEQ ID NO: 37917 - protein, 16 aa, BK virus
EFLQLIISVKSCVPLV

SEQ ID NO: 37918 - protein, 16 aa, BK virus
FLQLIISVKSCVPLVF

SEQ ID NO: 37919 - protein, 16 aa, BK virus
RSMILAQKSLKKQSRC

SEQ ID NO: 37920 - protein, 16 aa, BK virus
SMILAQKSLKKQSRCL

SEQ ID NO: 37921 - protein, 16 aa, BK virus
MILAQKSLKKQSRCLG

SEQ ID NO: 37922 - protein, 16 aa, BK virus
ILAQKSLKKQSRCLGN

SEQ ID NO: 37923 - protein, 16 aa, BK virus
RSVKSVRKKTSLITLS

SEQ ID NO: 37924 - protein, 16 aa, BK virus
SVKSVRKKTSLITLSI

SEQ ID NO: 37925 - protein, 16 aa, BK virus
VKSVRKKTSLITLSIM

SEQ ID NO: 37926 - protein, 16 aa, BK virus
KSVRKKTSLITLSIMK

SEQ ID NO: 37927 - protein, 16 aa, BK virus
SVRKKTSLITLSIMKS

SEQ ID NO: 37928 - protein, 16 aa, BK virus
VRKKTSLITLSIMKST

SEQ ID NO: 37929 - protein, 16 aa, BK virus
RKKTSLITLSIMKSTL

SEQ ID NO: 37930 - protein, 16 aa, BK virus
KKTSLITLSIMKSTLQ

SEQ ID NO: 37931 - protein, 16 aa, BK virus
KTSLITLSIMKSTLQM

SEQ ID NO: 37932 - protein, 16 aa, BK virus
TSLITLSIMKSTLQML

SEQ ID NO: 37933 - protein, 16 aa, BK virus
SLITLSIMKSTLQMLL

SEQ ID NO: 37934 - protein, 16 aa, BK virus
LITLSIMKSTLQMLLF

SEQ ID NO: 37935 - protein, 16 aa, BK virus
ITLSIMKSTLQMLLFL

SEQ ID NO: 37936 - protein, 16 aa, BK virus
TLSIMKSTLQMLLFLQ

SEQ ID NO: 37937 - protein, 16 aa, BK virus
LSIMKSTLQMLLFLQK

SEQ ID NO: 37938 - protein, 16 aa, BK virus
SIMKSTLQMLLFLQKV

SEQ ID NO: 37939 - protein, 16 aa, BK virus
IMKSTLQMLLFLQKVK

SEQ ID NO: 37940 - protein, 16 aa, BK virus
MKSTLQMLLFLQKVKI

SEQ ID NO: 37941 - protein, 16 aa, BK virus
KSTLQMLLFLQKVKIK

SEQ ID NO: 37942 - protein, 16 aa, BK virus
STLQMLLFLQKVKIKK

SEQ ID NO: 37943 - protein, 16 aa, BK virus
TLQMLLFLQKVKIKKV

SEQ ID NO: 37944 - protein, 16 aa, BK virus
LQMLLFLQKVKIKKVF

SEQ ID NO: 37945 - protein, 16 aa, BK virus
QMLLFLQKVKIKKVFV

SEQ ID NO: 37946 - protein, 16 aa, BK virus
MLLFLQKVKIKKVFVS

SEQ ID NO: 37947 - protein, 16 aa, BK virus
LLFLQKVKIKKVFVSK

SEQ ID NO: 37948 - protein, 16 aa, BK virus
LFLQKVKIKKVFVSKQ

SEQ ID NO: 37949 - protein, 16 aa, BK virus
NNIWQVLLGCTVCYLK

SEQ ID NO: 37950 - protein, 16 aa, BK virus
NIWQVLLGCTVCYLKW

SEQ ID NO: 37951 - protein, 16 aa, BK virus
IWQVLLGCTVCYLKWI

SEQ ID NO: 37952 - protein, 16 aa, BK virus
WQVLLGCTVCYLKWIL

SEQ ID NO: 37953 - protein, 16 aa, BK virus
YLIFCTVLFSMYLKED

SEQ ID NO: 37954 - protein, 16 aa, BK virus
LIFCTVLFSMYLKEDT

SEQ ID NO: 37955 - protein, 16 aa, BK virus
IFCTVLFSMYLKEDTG

SEQ ID NO: 37956 - protein, 16 aa, BK virus
FCTVLFSMYLKEDTGY

SEQ ID NO: 37957 - protein, 16 aa, BK virus
CTVLFSMYLKEDTGYL

SEQ ID NO: 37958 - protein, 16 aa, BK virus
TVLFSMYLKEDTGYLK

SEQ ID NO: 37959 - protein, 16 aa, BK virus
VLFSMYLKEDTGYLKV

SEQ ID NO: 37960 - protein, 16 aa, BK virus
LFSMYLKEDTGYLKVP

SEQ ID NO: 37961 - protein, 16 aa, BK virus
FSMYLKEDTGYLKVPL

SEQ ID NO: 37962 - protein, 16 aa, BK virus
SMYLKEDTGYLKVPLI

SEQ ID NO: 37963 - protein, 16 aa, BK virus
MYLKEDTGYLKVPLIV

SEQ ID NO: 37964 - protein, 16 aa, BK virus
YLKEDTGYLKVPLIVE

SEQ ID NO: 37965 - protein, 16 aa, BK virus
LKEDTGYLKVPLIVEK

SEQ ID NO: 37966 - protein, 16 aa, BK virus
KEDTGYLKVPLIVEKQ

SEQ ID NO: 37967 - protein, 16 aa, BK virus
EDTGYLKVPLIVEKQH

SEQ ID NO: 37968 - protein, 16 aa, BK virus
ENPYKTQSSYLKKEFY

SEQ ID NO: 37969 - protein, 16 aa, BK virus
NPYKTQSSYLKKEFYK

SEQ ID NO: 37970 - protein, 16 aa, BK virus
PYKTQSSYLKKEFYKV

SEQ ID NO: 37971 - protein, 16 aa, BK virus
YKTQSSYLKKEFYKVE

SEQ ID NO: 37972 - protein, 16 aa, BK virus
LILQLIYNLELLNGRK

SEQ ID NO: 37973 - protein, 16 aa, BK virus
ILQLIYNLELLNGRKG

SEQ ID NO: 37974 - protein, 16 aa, BK virus
LQLIYNLELLNGRKGW

SEQ ID NO: 37975 - protein, 16 aa, BK virus
QLIYNLELLNGRKGWI

SEQ ID NO: 37976 - protein, 16 aa, BK virus
LIYNLELLNGRKGWIL

SEQ ID NO: 37977 - protein, 16 aa, BK virus
IYNLELLNGRKGWILR

SEQ ID NO: 37978 - protein, 16 aa, BK virus
NIIYAWGNVFLILQEK

SEQ ID NO: 37979 - protein, 16 aa, BK virus
IIYAWGNVFLILQEKR

SEQ ID NO: 37980 - protein, 16 aa, BK virus
IYAWGNVFLILQEKRI

SEQ ID NO: 37981 - protein, 16 aa, BK virus
YAWGNVFLILQEKRIQ

SEQ ID NO: 37982 - protein, 16 aa, BK virus
AWGNVFLILQEKRIQK

SEQ ID NO: 37983 - protein, 16 aa, BK virus
WGNVFLILQEKRIQKL

SEQ ID NO: 37984 - protein, 16 aa, BK virus
GNVFLILQEKRIQKLK

SEQ ID NO: 37985 - protein, 16 aa, BK virus
NVFLILQEKRIQKLKT

SEQ ID NO: 37986 - protein, 16 aa, BK virus
VFLILQEKRIQKLKTL

SEQ ID NO: 37987 - protein, 16 aa, BK virus
FLILQEKRIQKLKTLD

SEQ ID NO: 37988 - protein, 16 aa, BK virus
LILQEKRIQKLKTLDM

SEQ ID NO: 37989 - protein, 16 aa, BK virus
ILQEKRIQKLKTLDMD

SEQ ID NO: 37990 - protein, 16 aa, BK virus
LQEKRIQKLKTLDMDQ

SEQ ID NO: 37991 - protein, 16 aa, BK virus
QEKRIQKLKTLDMDQA

SEQ ID NO: 37992 - protein, 16 aa, BK virus
EKRIQKLKTLDMDQAL

SEQ ID NO: 37993 - protein, 16 aa, BK virus
KRIQKLKTLDMDQALN

SEQ ID NO: 37994 - protein, 16 aa, BK virus
RIQKLKTLDMDQALNP

SEQ ID NO: 37995 - protein, 16 aa, BK virus
IQKLKTLDMDQALNPN

SEQ ID NO: 37996 - protein, 16 aa, BK virus
QKLKTLDMDQALNPNH

SEQ ID NO: 37997 - protein, 16 aa, BK virus
KLKTLDMDQALNPNHN

SEQ ID NO: 37998 - protein, 16 aa, BK virus
LKTLDMDQALNPNHNA

SEQ ID NO: 37999 - protein, 16 aa, BK virus
KTLDMDQALNPNHNAL

SEQ ID NO: 38000 - protein, 16 aa, BK virus
TLDMDQALNPNHNALP

SEQ ID NO: 38001 - protein, 16 aa, BK virus
LDMDQALNPNHNALPK

SEQ ID NO: 38002 - protein, 16 aa, BK virus
DMDQALNPNHNALPKS

SEQ ID NO: 38003 - protein, 16 aa, BK virus
MDQALNPNHNALPKSQ

SEQ ID NO: 38004 - protein, 16 aa, BK virus
DQALNPNHNALPKSQI

SEQ ID NO: 38005 - protein, 16 aa, BK virus
QALNPNHNALPKSQIL

SEQ ID NO: 38006 - protein, 16 aa, BK virus
ALNPNHNALPKSQILQ

SEQ ID NO: 38007 - protein, 16 aa, BK virus
LNPNHNALPKSQILQP

SEQ ID NO: 38008 - protein, 16 aa, BK virus
NPNHNALPKSQILQPL

SEQ ID NO: 38009 - protein, 16 aa, BK virus
PNHNALPKSQILQPLL

SEQ ID NO: 38010 - protein, 16 aa, BK virus
NHNALPKSQILQPLLK

SEQ ID NO: 38011 - protein, 16 aa, BK virus
HNALPKSQILQPLLKI

SEQ ID NO: 38012 - protein, 16 aa, BK virus
NALPKSQILQPLLKIP

SEQ ID NO: 38013 - protein, 16 aa, BK virus
ALPKSQILQPLLKIPK

SEQ ID NO: 38014 - protein, 16 aa, BK virus
LPKSQILQPLLKIPKG

SEQ ID NO: 38015 - protein, 16 aa, BK virus
PKSQILQPLLKIPKGQ

SEQ ID NO: 38016 - protein, 16 aa, BK virus
KSQILQPLLKIPKGQT

SEQ ID NO: 38017 - protein, 16 aa, BK virus
SQILQPLLKIPKGQTP

SEQ ID NO: 38018 - protein, 16 aa, BK virus
QILQPLLKIPKGQTPI

SEQ ID NO: 38019 - protein, 16 aa, BK virus
ILQPLLKIPKGQTPIV

SEQ ID NO: 38020 - protein, 16 aa, BK virus
LQPLLKIPKGQTPIVK

SEQ ID NO: 38021 - protein, 16 aa, BK virus
QPLLKIPKGQTPIVKS

SEQ ID NO: 38022 - protein, 16 aa, BK virus
PLLKIPKGQTPIVKSC

SEQ ID NO: 38023 - protein, 16 aa, BK virus
LLKIPKGQTPIVKSCI

SEQ ID NO: 38024 - protein, 16 aa, BK virus
LKIPKGQTPIVKSCIC

SEQ ID NO: 38025 - protein, 16 aa, BK virus
KIPKGQTPIVKSCICV

SEQ ID NO: 38026 - protein, 16 aa, BK virus
IPKGQTPIVKSCICVK

SEQ ID NO: 38027 - protein, 16 aa, BK virus
PKGQTPIVKSCICVKA

SEQ ID NO: 38028 - protein, 16 aa, BK virus
KGQTPIVKSCICVKAF

SEQ ID NO: 38029 - protein, 16 aa, BK virus
GQTPIVKSCICVKAFS

SEQ ID NO: 38030 - protein, 16 aa, BK virus
QTPIVKSCICVKAFSV

SEQ ID NO: 38031 - protein, 16 aa, BK virus
TPIVKSCICVKAFSVL

SEQ ID NO: 38032 - protein, 16 aa, BK virus
PIVKSCICVKAFSVLK

SEQ ID NO: 38033 - protein, 16 aa, BK virus
IVKSCICVKAFSVLKG

SEQ ID NO: 38034 - protein, 16 aa, BK virus
VKSCICVKAFSVLKGL

SEQ ID NO: 38035 - protein, 16 aa, BK virus
KSCICVKAFSVLKGLK

SEQ ID NO: 38036 - protein, 16 aa, BK virus
SCICVKAFSVLKGLKH

SEQ ID NO: 38037 - protein, 16 aa, BK virus
CICVKAFSVLKGLKHH

SEQ ID NO: 38038 - protein, 16 aa, BK virus
ICVKAFSVLKGLKHHP

SEQ ID NO: 38039 - protein, 16 aa, BK virus
CVKAFSVLKGLKHHPQ

SEQ ID NO: 38040 - protein, 16 aa, BK virus
VKAFSVLKGLKHHPQN

SEQ ID NO: 38041 - protein, 16 aa, BK virus
KAFSVLKGLKHHPQNN

SEQ ID NO: 38042 - protein, 16 aa, BK virus
AFSVLKGLKHHPQNNT

SEQ ID NO: 38043 - protein, 16 aa, BK virus
FSVLKGLKHHPQNNTS

SEQ ID NO: 38044 - protein, 16 aa, BK virus
SVLKGLKHHPQNNTSL

SEQ ID NO: 38045 - protein, 16 aa, BK virus
VLKGLKHHPQNNTSLK

SEQ ID NO: 38046 - protein, 16 aa, BK virus
LKGLKHHPQNNTSLKV

SEQ ID NO: 38047 - protein, 16 aa, BK virus
KGLKHHPQNNTSLKVA

SEQ ID NO: 38048 - protein, 16 aa, BK virus
GLKHHPQNNTSLKVAY

SEQ ID NO: 38049 - protein, 16 aa, BK virus
LKHHPQNNTSLKVAYT

SEQ ID NO: 38050 - protein, 16 aa, BK virus
KHHPQNNTSLKVAYTK

SEQ ID NO: 38051 - protein, 16 aa, BK virus
HHPQNNTSLKVAYTKA

SEQ ID NO: 38052 - protein, 16 aa, BK virus
HPQNNTSLKVAYTKAA

SEQ ID NO: 38053 - protein, 16 aa, BK virus
PQNNTSLKVAYTKAAF

SEQ ID NO: 38054 - protein, 16 aa, BK virus
QNNTSLKVAYTKAAFI

SEQ ID NO: 38055 - protein, 16 aa, BK virus
NNTSLKVAYTKAAFIK

SEQ ID NO: 38056 - protein, 16 aa, BK virus
NTSLKVAYTKAAFIKC

SEQ ID NO: 38057 - protein, 16 aa, BK virus
TSLKVAYTKAAFIKCI

SEQ ID NO: 38058 - protein, 16 aa, BK virus
SLKVAYTKAAFIKCIC

SEQ ID NO: 38059 - protein, 16 aa, BK virus
LKVAYTKAAFIKCICT

SEQ ID NO: 38060 - protein, 16 aa, BK virus
KVAYTKAAFIKCICTI

SEQ ID NO: 38061 - protein, 16 aa, BK virus
VAYTKAAFIKCICTIK

SEQ ID NO: 38062 - protein, 16 aa, BK virus
AYTKAAFIKCICTIKA

SEQ ID NO: 38063 - protein, 16 aa, BK virus
YTKAAFIKCICTIKAP

SEQ ID NO: 38064 - protein, 16 aa, BK virus
TKAAFIKCICTIKAPV

SEQ ID NO: 38065 - protein, 16 aa, BK virus
SILVCNCPCLSIYLII

SEQ ID NO: 38066 - protein, 16 aa, BK virus
ILVCNCPCLSIYLIIS

SEQ ID NO: 38067 - protein, 16 aa, BK virus
LVCNCPCLSIYLIISG

SEQ ID NO: 38068 - protein, 16 aa, BK virus
VCNCPCLSIYLIISGS

SEQ ID NO: 38069 - protein, 16 aa, BK virus
CNCPCLSIYLIISGSP

SEQ ID NO: 38070 - protein, 16 aa, BK virus
NCPCLSIYLIISGSPG

SEQ ID NO: 38071 - protein, 16 aa, BK virus
CPCLSIYLIISGSPGS

SEQ ID NO: 38072 - protein, 16 aa, BK virus
PCLSIYLIISGSPGSL

SEQ ID NO: 38073 - protein, 16 aa, BK virus
CLSIYLIISGSPGSLS

SEQ ID NO: 38074 - protein, 16 aa, BK virus
LSIYLIISGSPGSLSV

SEQ ID NO: 38075 - protein, 16 aa, BK virus
SIYLIISGSPGSLSVP

SEQ ID NO: 38076 - protein, 16 aa, BK virus
IYLIISGSPGSLSVPS

SEQ ID NO: 38077 - protein, 16 aa, BK virus
YLIISGSPGSLSVPSN

SEQ ID NO: 38078 - protein, 16 aa, BK virus
LIISGSPGSLSVPSNT

SEQ ID NO: 38079 - protein, 16 aa, BK virus
IISGSPGSLSVPSNTL

SEQ ID NO: 38080 - protein, 16 aa, BK virus
ISGSPGSLSVPSNTLT

SEQ ID NO: 38081 - protein, 16 aa, BK virus
SGSPGSLSVPSNTLTS

SEQ ID NO: 38082 - protein, 16 aa, BK virus
GSPGSLSVPSNTLTSS

SEQ ID NO: 38083 - protein, 16 aa, BK virus
SPGSLSVPSNTLTSST

SEQ ID NO: 38084 - protein, 16 aa, BK virus
PGSLSVPSNTLTSSTW

SEQ ID NO: 38085 - protein, 16 aa, BK virus
GSLSVPSNTLTSSTWD

SEQ ID NO: 38086 - protein, 16 aa, BK virus
SLSVPSNTLTSSTWDS

SEQ ID NO: 38087 - protein, 16 aa, BK virus
LSVPSNTLTSSTWDSI

SEQ ID NO: 38088 - protein, 16 aa, BK virus
SVPSNTLTSSTWDSIP

SEQ ID NO: 38089 - protein, 16 aa, BK virus
VPSNTLTSSTWDSIPY

SEQ ID NO: 38090 - protein, 16 aa, BK virus
PSNTLTSSTWDSIPYI

SEQ ID NO: 38091 - protein, 16 aa, BK virus
SNTLTSSTWDSIPYIG

SEQ ID NO: 38092 - protein, 16 aa, BK virus
NTLTSSTWDSIPYIGC

SEQ ID NO: 38093 - protein, 16 aa, BK virus
TLTSSTWDSIPYIGCP

SEQ ID NO: 38094 - protein, 16 aa, BK virus
LTSSTWDSIPYIGCPS

SEQ ID NO: 38095 - protein, 16 aa, BK virus
TSSTWDSIPYIGCPST

SEQ ID NO: 38096 - protein, 16 aa, BK virus
SSTWDSIPYIGCPSTL

SEQ ID NO: 38097 - protein, 16 aa, BK virus
STWDSIPYIGCPSTLW

SEQ ID NO: 38098 - protein, 16 aa, BK virus
TWDSIPYIGCPSTLWV

SEQ ID NO: 38099 - protein, 16 aa, BK virus
WDSIPYIGCPSTLWVL

SEQ ID NO: 38100 - protein, 16 aa, BK virus
DSIPYIGCPSTLWVLL

SEQ ID NO: 38101 - protein, 16 aa, BK virus
SIPYIGCPSTLWVLLF

SEQ ID NO: 38102 - protein, 16 aa, BK virus
IPYIGCPSTLWVLLFI

SEQ ID NO: 38103 - protein, 16 aa, BK virus
PYIGCPSTLWVLLFIR

SEQ ID NO: 38104 - protein, 16 aa, BK virus
YIGCPSTLWVLLFIRS

SEQ ID NO: 38105 - protein, 16 aa, BK virus
IGCPSTLWVLLFIRSL

SEQ ID NO: 38106 - protein, 16 aa, BK virus
GCPSTLWVLLFIRSLS

SEQ ID NO: 38107 - protein, 16 aa, BK virus
CPSTLWVLLFIRSLSK

SEQ ID NO: 38108 - protein, 16 aa, BK virus
PSTLWVLLFIRSLSKK

SEQ ID NO: 38109 - protein, 16 aa, BK virus
STLWVLLFIRSLSKKE

SEQ ID NO: 38110 - protein, 16 aa, BK virus
TLWVLLFIRSLSKKEI

SEQ ID NO: 38111 - protein, 16 aa, BK virus
LWVLLFIRSLSKKEIG

SEQ ID NO: 38112 - protein, 16 aa, BK virus
GFFTDLFLRRILKYLA

SEQ ID NO: 38113 - protein, 16 aa, BK virus
FFTDLFLRRILKYLAR

SEQ ID NO: 38114 - protein, 16 aa, BK virus
FTDLFLRRILKYLARP

SEQ ID NO: 38115 - protein, 16 aa, BK virus
TDLFLRRILKYLARPL

SEQ ID NO: 38116 - protein, 16 aa, BK virus
DLFLRRILKYLARPLH

SEQ ID NO: 38117 - protein, 16 aa, BK virus
LFLRRILKYLARPLHC

SEQ ID NO: 38118 - protein, 16 aa, BK virus
FLRRILKYLARPLHCC

SEQ ID NO: 38119 - protein, 16 aa, BK virus
LRRILKYLARPLHCCV

SEQ ID NO: 38120 - protein, 16 aa, BK virus
RRILKYLARPLHCCVP

SEQ ID NO: 38121 - protein, 16 aa, BK virus
RILKYLARPLHCCVPE

SEQ ID NO: 38122 - protein, 16 aa, BK virus
ILKYLARPLHCCVPEL

SEQ ID NO: 38123 - protein, 16 aa, BK virus
LKYLARPLHCCVPELL

SEQ ID NO: 38124 - protein, 16 aa, BK virus
KYLARPLHCCVPELLV

SEQ ID NO: 38125 - protein, 16 aa, BK virus
YLARPLHCCVPELLVN

SEQ ID NO: 38126 - protein, 16 aa, BK virus
LARPLHCCVPELLVNR

SEQ ID NO: 38127 - protein, 16 aa, BK virus
ARPLHCCVPELLVNRP

SEQ ID NO: 38128 - protein, 16 aa, BK virus
RPLHCCVPELLVNRPQ

SEQ ID NO: 38129 - protein, 16 aa, BK virus
PLHCCVPELLVNRPQI

SEQ ID NO: 38130 - protein, 16 aa, BK virus
LHCCVPELLVNRPQIS

SEQ ID NO: 38131 - protein, 16 aa, BK virus
HCCVPELLVNRPQISA

SEQ ID NO: 38132 - protein, 16 aa, BK virus
CCVPELLVNRPQISAA

SEQ ID NO: 38133 - protein, 16 aa, BK virus
CVPELLVNRPQISAAE

SEQ ID NO: 38134 - protein, 16 aa, BK virus
VPELLVNRPQISAAET

SEQ ID NO: 38135 - protein, 16 aa, BK virus
PELLVNRPQISAAETY

SEQ ID NO: 38136 - protein, 16 aa, BK virus
ELLVNRPQISAAETYR

SEQ ID NO: 38137 - protein, 16 aa, BK virus
LLVNRPQISAAETYRL

SEQ ID NO: 38138 - protein, 16 aa, BK virus
LVNRPQISAAETYRLS

SEQ ID NO: 38139 - protein, 16 aa, BK virus
VNRPQISAAETYRLSA

SEQ ID NO: 38140 - protein, 16 aa, BK virus
NRPQISAAETYRLSAL

SEQ ID NO: 38141 - protein, 16 aa, BK virus
RPQISAAETYRLSALQ

SEQ ID NO: 38142 - protein, 16 aa, BK virus
PQISAAETYRLSALQR

SEQ ID NO: 38143 - protein, 16 aa, BK virus
QISAAETYRLSALQRG

SEQ ID NO: 38144 - protein, 16 aa, BK virus
ISAAETYRLSALQRGP

SEQ ID NO: 38145 - protein, 16 aa, BK virus
SAAETYRLSALQRGPT

SEQ ID NO: 38146 - protein, 16 aa, BK virus
AAETYRLSALQRGPTP

SEQ ID NO: 38147 - protein, 16 aa, BK virus
AETYRLSALQRGPTPC

SEQ ID NO: 38148 - protein, 16 aa, BK virus
ETYRLSALQRGPTPCS

SEQ ID NO: 38149 - protein, 16 aa, BK virus
TYRLSALQRGPTPCSS

SEQ ID NO: 38150 - protein, 16 aa, BK virus
YRLSALQRGPTPCSSS

SEQ ID NO: 38151 - protein, 16 aa, BK virus
RLSALQRGPTPCSSSN

SEQ ID NO: 38152 - protein, 16 aa, BK virus
LSALQRGPTPCSSSNT

SEQ ID NO: 38153 - protein, 16 aa, BK virus
SALQRGPTPCSSSNTV

SEQ ID NO: 38154 - protein, 16 aa, BK virus
ALQRGPTPCSSSNTVV

SEQ ID NO: 38155 - protein, 16 aa, BK virus
LQRGPTPCSSSNTVVA

SEQ ID NO: 38156 - protein, 16 aa, BK virus
QRGPTPCSSSNTVVAV

SEQ ID NO: 38157 - protein, 16 aa, BK virus
RGPTPCSSSNTVVAVL

SEQ ID NO: 38158 - protein, 16 aa, BK virus
GPTPCSSSNTVVAVLV

SEQ ID NO: 38159 - protein, 16 aa, BK virus
PTPCSSSNTVVAVLVT

SEQ ID NO: 38160 - protein, 16 aa, BK virus
STGGTFSPPVKVPKYL

SEQ ID NO: 38161 - protein, 16 aa, BK virus
TGGTFSPPVKVPKYLA

SEQ ID NO: 38162 - protein, 16 aa, BK virus
GGTFSPPVKVPKYLAF

SEQ ID NO: 38163 - protein, 16 aa, BK virus
GTFSPPVKVPKYLAFS

SEQ ID NO: 38164 - protein, 16 aa, BK virus
TFSPPVKVPKYLAFSF

SEQ ID NO: 38165 - protein, 16 aa, BK virus
FSPPVKVPKYLAFSFL

SEQ ID NO: 38166 - protein, 16 aa, BK virus
SPPVKVPKYLAFSFLL

SEQ ID NO: 38167 - protein, 16 aa, BK virus
PPVKVPKYLAFSFLLG

SEQ ID NO: 38168 - protein, 16 aa, BK virus
PVKVPKYLAFSFLLGS

SEQ ID NO: 38169 - protein, 16 aa, BK virus
VKVPKYLAFSFLLGSG

SEQ ID NO: 38170 - protein, 16 aa, BK virus
KVPKYLAFSFLLGSGT

SEQ ID NO: 38171 - protein, 16 aa, BK virus
VPKYLAFSFLLGSGTQ

SEQ ID NO: 38172 - protein, 16 aa, BK virus
PKYLAFSFLLGSGTQH

SEQ ID NO: 38173 - protein, 16 aa, BK virus
KYLAFSFLLGSGTQHS

SEQ ID NO: 38174 - protein, 16 aa, BK virus
YLAFSFLLGSGTQHST

SEQ ID NO: 38175 - protein, 16 aa, BK virus
LAFSFLLGSGTQHSTG

SEQ ID NO: 38176 - protein, 16 aa, BK virus
ALWSVFITWDWAVGFL

SEQ ID NO: 38177 - protein, 16 aa, BK virus
LWSVFITWDWAVGFLG

SEQ ID NO: 38178 - protein, 16 aa, BK virus
WSVFITWDWAVGFLGV

SEQ ID NO: 38179 - protein, 16 aa, BK virus
SVFITWDWAVGFLGVI

SEQ ID NO: 38180 - protein, 16 aa, BK virus
VFITWDWAVGFLGVIV

SEQ ID NO: 38181 - protein, 16 aa, BK virus
FITWDWAVGFLGVIVP

SEQ ID NO: 38182 - protein, 16 aa, BK virus
ITWDWAVGFLGVIVPS

SEQ ID NO: 38183 - protein, 16 aa, BK virus
TWDWAVGFLGVIVPSG

SEQ ID NO: 38184 - protein, 16 aa, BK virus
WDWAVGFLGVIVPSGY

SEQ ID NO: 38185 - protein, 16 aa, BK virus
DWAVGFLGVIVPSGYF

SEQ ID NO: 38186 - protein, 16 aa, BK virus
WAVGFLGVIVPSGYFD

SEQ ID NO: 38187 - protein, 16 aa, BK virus
AVGFLGVIVPSGYFDL

SEQ ID NO: 38188 - protein, 16 aa, BK virus
FISTPCISKGSPPTAK

SEQ ID NO: 38189 - protein, 16 aa, BK virus
ISTPCISKGSPPTAKK

SEQ ID NO: 38190 - protein, 16 aa, BK virus
STPCISKGSPPTAKKW

SEQ ID NO: 38191 - protein, 16 aa, BK virus
TPCISKGSPPTAKKWK

SEQ ID NO: 38192 - protein, 16 aa, BK virus
PCISKGSPPTAKKWKL

SEQ ID NO: 38193 - protein, 16 aa, BK virus
CISKGSPPTAKKWKLL

SEQ ID NO: 38194 - protein, 16 aa, BK virus
ISKGSPPTAKKWKLLP

SEQ ID NO: 38195 - protein, 16 aa, BK virus
RLSMLVIPITSVCTVT

SEQ ID NO: 38196 - protein, 16 aa, BK virus
LSMLVIPITSVCTVTA

SEQ ID NO: 38197 - protein, 16 aa, BK virus
SMLVIPITSVCTVTAS

SEQ ID NO: 38198 - protein, 16 aa, BK virus
MLVIPITSVCTVTASH

SEQ ID NO: 38199 - protein, 16 aa, BK virus
LVIPITSVCTVTASHI

SEQ ID NO: 38200 - protein, 16 aa, BK virus
VIPITSVCTVTASHIS

SEQ ID NO: 38201 - protein, 16 aa, BK virus
IPITSVCTVTASHISR

SEQ ID NO: 38202 - protein, 16 aa, BK virus
PITSVCTVTASHISRF

SEQ ID NO: 38203 - protein, 16 aa, BK virus
ITSVCTVTASHISRFP

SEQ ID NO: 38204 - protein, 16 aa, BK virus
TSVCTVTASHISRFPQ

SEQ ID NO: 38205 - protein, 16 aa, BK virus
SVCTVTASHISRFPQV

SEQ ID NO: 38206 - protein, 16 aa, BK virus
VCTVTASHISRFPQVR

SEQ ID NO: 38207 - protein, 16 aa, BK virus
CTVTASHISRFPQVRS

SEQ ID NO: 38208 - protein, 16 aa, BK virus
TVTASHISRFPQVRSS

SEQ ID NO: 38209 - protein, 16 aa, BK virus
VTASHISRFPQVRSSF

SEQ ID NO: 38210 - protein, 16 aa, BK virus
TASHISRFPQVRSSFK

SEQ ID NO: 38211 - protein, 16 aa, BK virus
ASHISRFPQVRSSFKL

SEQ ID NO: 38212 - protein, 16 aa, BK virus
SHISRFPQVRSSFKLG

SEQ ID NO: 38213 - protein, 16 aa, BK virus
HISRFPQVRSSFKLGR

SEQ ID NO: 38214 - protein, 16 aa, BK virus
ISRFPQVRSSFKLGRG

SEQ ID NO: 38215 - protein, 16 aa, BK virus
SRFPQVRSSFKLGRGI

SEQ ID NO: 38216 - protein, 16 aa, BK virus
RFPQVRSSFKLGRGIL

SEQ ID NO: 38217 - protein, 16 aa, BK virus
FPQVRSSFKLGRGILA

SEQ ID NO: 38218 - protein, 16 aa, BK virus
PQVRSSFKLGRGILAV

SEQ ID NO: 38219 - protein, 16 aa, BK virus
QVRSSFKLGRGILAVL

SEQ ID NO: 38220 - protein, 16 aa, BK virus
QGSIFLSGLSLLKSFS

SEQ ID NO: 38221 - protein, 16 aa, BK virus
GSIFLSGLSLLKSFSA

SEQ ID NO: 38222 - protein, 16 aa, BK virus
SIFLSGLSLLKSFSAL

SEQ ID NO: 38223 - protein, 16 aa, BK virus
IFLSGLSLLKSFSALS

SEQ ID NO: 38224 - protein, 16 aa, BK virus
FLSGLSLLKSFSALSF

SEQ ID NO: 38225 - protein, 16 aa, BK virus
LSGLSLLKSFSALSFR

SEQ ID NO: 38226 - protein, 16 aa, BK virus
SGLSLLKSFSALSFRL

SEQ ID NO: 38227 - protein, 16 aa, BK virus
GLSLLKSFSALSFRLK

SEQ ID NO: 38228 - protein, 16 aa, BK virus
LSLLKSFSALSFRLKP

SEQ ID NO: 38229 - protein, 16 aa, BK virus
SLLKSFSALSFRLKPL

SEQ ID NO: 38230 - protein, 16 aa, BK virus
LLKSFSALSFRLKPLR

SEQ ID NO: 38231 - protein, 16 aa, BK virus
LKSFSALSFRLKPLRF

SEQ ID NO: 38232 - protein, 16 aa, BK virus
KSFSALSFRLKPLRFS

SEQ ID NO: 38233 - protein, 16 aa, BK virus
SFSALSFRLKPLRFSS

SEQ ID NO: 38234 - protein, 16 aa, BK virus
FSALSFRLKPLRFSSG

SEQ ID NO: 38235 - protein, 16 aa, BK virus
SALSFRLKPLRFSSGS

SEQ ID NO: 38236 - protein, 16 aa, BK virus
ALSFRLKPLRFSSGSP

SEQ ID NO: 38237 - protein, 16 aa, BK virus
LSFRLKPLRFSSGSPI

SEQ ID NO: 38238 - protein, 16 aa, BK virus
SFRLKPLRFSSGSPIS

SEQ ID NO: 38239 - protein, 16 aa, BK virus
FRLKPLRFSSGSPISG

SEQ ID NO: 38240 - protein, 16 aa, BK virus
RLKPLRFSSGSPISGF

SEQ ID NO: 38241 - protein, 16 aa, BK virus
LKPLRFSSGSPISGFR

SEQ ID NO: 38242 - protein, 16 aa, BK virus
KPLRFSSGSPISGFRK

SEQ ID NO: 38243 - protein, 16 aa, BK virus
PLRFSSGSPISGFRKH

SEQ ID NO: 38244 - protein, 16 aa, BK virus
LRFSSGSPISGFRKHS

SEQ ID NO: 38245 - protein, 16 aa, BK virus
RFSSGSPISGFRKHST

SEQ ID NO: 38246 - protein, 16 aa, BK virus
FSSGSPISGFRKHSTS

SEQ ID NO: 38247 - protein, 16 aa, BK virus
SSGSPISGFRKHSTSV

SEQ ID NO: 38248 - protein, 16 aa, BK virus
SGSPISGFRKHSTSVI

SEQ ID NO: 38249 - protein, 16 aa, BK virus
GSPISGFRKHSTSVIA

SEQ ID NO: 38250 - protein, 16 aa, BK virus
SPISGFRKHSTSVIAS

SEQ ID NO: 38251 - protein, 16 aa, BK virus
PISGFRKHSTSVIAST

SEQ ID NO: 38252 - protein, 16 aa, BK virus
ISGFRKHSTSVIASTP

SEQ ID NO: 38253 - protein, 16 aa, BK virus
SGFRKHSTSVIASTPV

SEQ ID NO: 38254 - protein, 16 aa, BK virus
GFRKHSTSVIASTPVL

SEQ ID NO: 38255 - protein, 16 aa, BK virus
FRKHSTSVIASTPVLT

SEQ ID NO: 38256 - protein, 16 aa, BK virus
RKHSTSVIASTPVLTS

SEQ ID NO: 38257 - protein, 16 aa, BK virus
KHSTSVIASTPVLTSR

SEQ ID NO: 38258 - protein, 16 aa, BK virus
HSTSVIASTPVLTSRT

SEQ ID NO: 38259 - protein, 16 aa, BK virus
STSVIASTPVLTSRTS

SEQ ID NO: 38260 - protein, 16 aa, BK virus
TSVIASTPVLTSRTST

SEQ ID NO: 38261 - protein, 16 aa, BK virus
SVIASTPVLTSRTSTP

SEQ ID NO: 38262 - protein, 16 aa, BK virus
VIASTPVLTSRTSTPP

SEQ ID NO: 38263 - protein, 16 aa, BK virus
IASTPVLTSRTSTPPF

SEQ ID NO: 38264 - protein, 16 aa, BK virus
ASTPVLTSRTSTPPFI

SEQ ID NO: 38265 - protein, 16 aa, BK virus
STPVLTSRTSTPPFIS

SEQ ID NO: 38266 - protein, 16 aa, BK virus
TPVLTSRTSTPPFISS

SEQ ID NO: 38267 - protein, 16 aa, BK virus
PVLTSRTSTPPFISSF

SEQ ID NO: 38268 - protein, 16 aa, BK virus
VLTSRTSTPPFISSFG

SEQ ID NO: 38269 - protein, 16 aa, BK virus
LTSRTSTPPFISSFGT

SEQ ID NO: 38270 - protein, 16 aa, BK virus
TSRTSTPPFISSFGTC

SEQ ID NO: 38271 - protein, 16 aa, BK virus
SRTSTPPFISSFGTCT

SEQ ID NO: 38272 - protein, 16 aa, BK virus
RTSTPPFISSFGTCTG

SEQ ID NO: 38273 - protein, 16 aa, BK virus
TSTPPFISSFGTCTGS

SEQ ID NO: 38274 - protein, 16 aa, BK virus
STPPFISSFGTCTGSF

SEQ ID NO: 38275 - protein, 16 aa, BK virus
TPPFISSFGTCTGSFG

SEQ ID NO: 38276 - protein, 16 aa, BK virus
PPFISSFGTCTGSFGF

SEQ ID NO: 38277 - protein, 16 aa, BK virus
PFISSFGTCTGSFGFL

SEQ ID NO: 38278 - protein, 16 aa, BK virus
FISSFGTCTGSFGFLG

SEQ ID NO: 38279 - protein, 16 aa, BK virus
ISSFGTCTGSFGFLGA

SEQ ID NO: 38280 - protein, 16 aa, BK virus
SSFGTCTGSFGFLGAA

SEQ ID NO: 38281 - protein, 16 aa, BK virus
SFGTCTGSFGFLGAAP

SEQ ID NO: 38282 - protein, 16 aa, BK virus
FGTCTGSFGFLGAAPG

SEQ ID NO: 38283 - protein, 16 aa, BK virus
GTCTGSFGFLGAAPGH

SEQ ID NO: 38284 - protein, 16 aa, BK virus
TCTGSFGFLGAAPGHS

SEQ ID NO: 38285 - protein, 16 aa, BK virus
CTGSFGFLGAAPGHSP

SEQ ID NO: 38286 - protein, 16 aa, BK virus
TGSFGFLGAAPGHSPF

SEQ ID NO: 38287 - protein, 16 aa, BK virus
GSFGFLGAAPGHSPFL

SEQ ID NO: 38288 - protein, 16 aa, BK virus
SFGFLGAAPGHSPFLL

SEQ ID NO: 38289 - protein, 16 aa, BK virus
FGFLGAAPGHSPFLLV

SEQ ID NO: 38290 - protein, 16 aa, BK virus
GFLGAAPGHSPFLLVG

SEQ ID NO: 38291 - protein, 16 aa, BK virus
FLGAAPGHSPFLLVGA

SEQ ID NO: 38292 - protein, 16 aa, BK virus
LGAAPGHSPFLLVGAI

SEQ ID NO: 38293 - protein, 16 aa, BK virus
GAAPGHSPFLLVGAIF

SEQ ID NO: 38294 - protein, 16 aa, BK virus
AAPGHSPFLLVGAIFI

SEQ ID NO: 38295 - protein, 16 aa, BK virus
APGHSPFLLVGAIFIC

SEQ ID NO: 38296 - protein, 16 aa, BK virus
PGHSPFLLVGAIFICF

SEQ ID NO: 38297 - protein, 16 aa, BK virus
GHSPFLLVGAIFICFK

SEQ ID NO: 38298 - protein, 16 aa, BK virus
HSPFLLVGAIFICFKS

SEQ ID NO: 38299 - protein, 16 aa, BK virus
SPFLLVGAIFICFKSR

SEQ ID NO: 38300 - protein, 16 aa, BK virus
PFLLVGAIFICFKSRC

SEQ ID NO: 38301 - protein, 16 aa, BK virus
FLLVGAIFICFKSRCY

SEQ ID NO: 38302 - protein, 16 aa, BK virus
LLVGAIFICFKSRCYS

SEQ ID NO: 38303 - protein, 16 aa, BK virus
LVGAIFICFKSRCYSP

SEQ ID NO: 38304 - protein, 16 aa, BK virus
VGAIFICFKSRCYSPV

SEQ ID NO: 38305 - protein, 16 aa, BK virus
GAIFICFKSRCYSPVQ

SEQ ID NO: 38306 - protein, 16 aa, BK virus
AIFICFKSRCYSPVQA

SEQ ID NO: 38307 - protein, 16 aa, BK virus
RQHPLRSSSLISTSWG

SEQ ID NO: 38308 - protein, 16 aa, BK virus
QHPLRSSSLISTSWGN

SEQ ID NO: 38309 - protein, 16 aa, BK virus
HPLRSSSLISTSWGNS

SEQ ID NO: 38310 - protein, 16 aa, BK virus
PLRSSSLISTSWGNSF

SEQ ID NO: 38311 - protein, 16 aa, BK virus
LRSSSLISTSWGNSFF

SEQ ID NO: 38312 - protein, 16 aa, BK virus
RSSSLISTSWGNSFFY

SEQ ID NO: 38313 - protein, 16 aa, BK virus
SSSLISTSWGNSFFYK

SEQ ID NO: 38314 - protein, 16 aa, BK virus
SSLISTSWGNSFFYKL

SEQ ID NO: 38315 - protein, 16 aa, BK virus
SLISTSWGNSFFYKLS

SEQ ID NO: 38316 - protein, 16 aa, BK virus
VHSLCNFFYTVSIIYT

SEQ ID NO: 38317 - protein, 16 aa, BK virus
HSLCNFFYTVSIIYTI

SEQ ID NO: 38318 - protein, 16 aa, BK virus
SLCNFFYTVSIIYTIS

SEQ ID NO: 38319 - protein, 16 aa, BK virus
LCNFFYTVSIIYTISM

SEQ ID NO: 38320 - protein, 16 aa, BK virus
CNFFYTVSIIYTISMA

SEQ ID NO: 38321 - protein, 16 aa, BK virus
NFFYTVSIIYTISMAK

SEQ ID NO: 38322 - protein, 16 aa, BK virus
FFYTVSIIYTISMAKM

SEQ ID NO: 38323 - protein, 16 aa, BK virus
FYTVSIIYTISMAKMY

SEQ ID NO: 38324 - protein, 16 aa, BK virus
YTVSIIYTISMAKMYT

SEQ ID NO: 38325 - protein, 16 aa, BK virus
TVSIIYTISMAKMYTG

SEQ ID NO: 38326 - protein, 16 aa, BK virus
VSIIYTISMAKMYTGT

SEQ ID NO: 38327 - protein, 16 aa, BK virus
SIIYTISMAKMYTGTF

SEQ ID NO: 38328 - protein, 16 aa, BK virus
IIYTISMAKMYTGTFP

SEQ ID NO: 38329 - protein, 16 aa, BK virus
IYTISMAKMYTGTFPF

SEQ ID NO: 38330 - protein, 16 aa, BK virus
YTISMAKMYTGTFPFS

SEQ ID NO: 38331 - protein, 16 aa, BK virus
TISMAKMYTGTFPFSY

SEQ ID NO: 38332 - protein, 16 aa, BK virus
ISMAKMYTGTFPFSYL

SEQ ID NO: 38333 - protein, 16 aa, BK virus
SMAKMYTGTFPFSYLS

SEQ ID NO: 38334 - protein, 16 aa, BK virus
MAKMYTGTFPFSYLSN

SEQ ID NO: 38335 - protein, 16 aa, BK virus
AKMYTGTFPFSYLSNH

SEQ ID NO: 38336 - protein, 16 aa, BK virus
GPNRGKIRIILLNIII

SEQ ID NO: 38337 - protein, 16 aa, BK virus
PNRGKIRIILLNIIIK

SEQ ID NO: 38338 - protein, 16 aa, BK virus
NRGKIRIILLNIIIKV

SEQ ID NO: 38339 - protein, 16 aa, BK virus
RGKIRIILLNIIIKVY

SEQ ID NO: 38340 - protein, 16 aa, BK virus
GKIRIILLNIIIKVYR

SEQ ID NO: 38341 - protein, 16 aa, BK virus
KIRIILLNIIIKVYRG

SEQ ID NO: 38342 - protein, 16 aa, BK virus
IRIILLNIIIKVYRGI

SEQ ID NO: 38343 - protein, 16 aa, BK virus
RIILLNIIIKVYRGIY

SEQ ID NO: 38344 - protein, 16 aa, BK virus
IILLNIIIKVYRGIYN

SEQ ID NO: 38345 - protein, 16 aa, BK virus
ILLNIIIKVYRGIYNC

SEQ ID NO: 38346 - protein, 16 aa, BK virus
LLNIIIKVYRGIYNCP

SEQ ID NO: 38347 - protein, 16 aa, BK virus
LNIIIKVYRGIYNCPG

SEQ ID NO: 38348 - protein, 16 aa, BK virus
NIIIKVYRGIYNCPGS

SEQ ID NO: 38349 - protein, 16 aa, BK virus
IIIKVYRGIYNCPGSF

SEQ ID NO: 38350 - protein, 16 aa, BK virus
IIKVYRGIYNCPGSFL

SEQ ID NO: 38351 - protein, 16 aa, BK virus
IKVYRGIYNCPGSFLQ

SEQ ID NO: 38352 - protein, 16 aa, BK virus
KVYRGIYNCPGSFLQK

SEQ ID NO: 38353 - protein, 16 aa, BK virus
VYRGIYNCPGSFLQKS

SEQ ID NO: 38354 - protein, 16 aa, BK virus
YRGIYNCPGSFLQKSS

SEQ ID NO: 38355 - protein, 16 aa, BK virus
RGIYNCPGSFLQKSSQ

SEQ ID NO: 38356 - protein, 16 aa, BK virus
GIYNCPGSFLQKSSQG

SEQ ID NO: 38357 - protein, 16 aa, BK virus
IYNCPGSFLQKSSQGV

SEQ ID NO: 38358 - protein, 16 aa, BK virus
YNCPGSFLQKSSQGVS

SEQ ID NO: 38359 - protein, 16 aa, BK virus
NCPGSFLQKSSQGVSK

SEQ ID NO: 38360 - protein, 16 aa, BK virus
CPGSFLQKSSQGVSKK

SEQ ID NO: 38361 - protein, 16 aa, BK virus
PGSFLQKSSQGVSKKS

SEQ ID NO: 38362 - protein, 16 aa, BK virus
GSFLQKSSQGVSKKSF

SEQ ID NO: 38363 - protein, 16 aa, BK virus
SFLQKSSQGVSKKSFC

SEQ ID NO: 38364 - protein, 16 aa, BK virus
FLQKSSQGVSKKSFCS

SEQ ID NO: 38365 - protein, 16 aa, BK virus
LQKSSQGVSKKSFCSS

SEQ ID NO: 38366 - protein, 16 aa, BK virus
QKSSQGVSKKSFCSSL

SEQ ID NO: 38367 - protein, 16 aa, BK virus
KSSQGVSKKSFCSSLQ

SEQ ID NO: 38368 - protein, 16 aa, BK virus
SSQGVSKKSFCSSLQF

SEQ ID NO: 38369 - protein, 16 aa, BK virus
SQGVSKKSFCSSLQFL

SEQ ID NO: 38370 - protein, 16 aa, BK virus
GYRRYIIPNNMPQSLG

SEQ ID NO: 38371 - protein, 16 aa, BK virus
YRRYIIPNNMPQSLGN

SEQ ID NO: 38372 - protein, 16 aa, BK virus
RRYIIPNNMPQSLGNS

SEQ ID NO: 38373 - protein, 16 aa, BK virus
RYIIPNNMPQSLGNSS

SEQ ID NO: 38374 - protein, 16 aa, BK virus
YIIPNNMPQSLGNSSK

SEQ ID NO: 38375 - protein, 16 aa, BK virus
IIPNNMPQSLGNSSKQ

SEQ ID NO: 38376 - protein, 16 aa, BK virus
IPNNMPQSLGNSSKQR

SEQ ID NO: 38377 - protein, 16 aa, BK virus
PNNMPQSLGNSSKQRR

SEQ ID NO: 38378 - protein, 16 aa, BK virus
NNMPQSLGNSSKQRRT

SEQ ID NO: 38379 - protein, 16 aa, BK virus
NMPQSLGNSSKQRRTP

SEQ ID NO: 38380 - protein, 16 aa, BK virus
MPQSLGNSSKQRRTPM

SEQ ID NO: 38381 - protein, 16 aa, BK virus
PQSLGNSSKQRRTPMP

SEQ ID NO: 38382 - protein, 16 aa, BK virus
QSLGNSSKQRRTPMPR

SEQ ID NO: 38383 - protein, 16 aa, BK virus
SLGNSSKQRRTPMPRI

SEQ ID NO: 38384 - protein, 16 aa, BK virus
LGNSSKQRRTPMPRIK

SEQ ID NO: 38385 - protein, 16 aa, BK virus
GNSSKQRRTPMPRIKV

SEQ ID NO: 38386 - protein, 16 aa, BK virus
NSSKQRRTPMPRIKVL

SEQ ID NO: 38387 - protein, 16 aa, BK virus
SSKQRRTPMPRIKVLN

SEQ ID NO: 38388 - protein, 16 aa, BK virus
SKQRRTPMPRIKVLNI

SEQ ID NO: 38389 - protein, 16 aa, BK virus
KQRRTPMPRIKVLNII

SEQ ID NO: 38390 - protein, 16 aa, BK virus
QRRTPMPRIKVLNIIN

SEQ ID NO: 38391 - protein, 16 aa, BK virus
RRTPMPRIKVLNIINK

SEQ ID NO: 38392 - protein, 16 aa, BK virus
RTPMPRIKVLNIINKS

SEQ ID NO: 38393 - protein, 16 aa, BK virus
TPMPRIKVLNIINKSI

SEQ ID NO: 38394 - protein, 16 aa, BK virus
PMPRIKVLNIINKSIY

SEQ ID NO: 38395 - protein, 16 aa, BK virus
MPRIKVLNIINKSIYT

SEQ ID NO: 38396 - protein, 16 aa, BK virus
PRIKVLNIINKSIYTR

SEQ ID NO: 38397 - protein, 16 aa, BK virus
RIKVLNIINKSIYTRK

SEQ ID NO: 38398 - protein, 16 aa, BK virus
IKVLNIINKSIYTRKQ

SEQ ID NO: 38399 - protein, 16 aa, BK virus
KVLNIINKSIYTRKQN

SEQ ID NO: 38400 - protein, 16 aa, BK virus
VLNIINKSIYTRKQNI

SEQ ID NO: 38401 - protein, 16 aa, BK virus
LNIINKSIYTRKQNII

SEQ ID NO: 38402 - protein, 16 aa, BK virus
NIINKSIYTRKQNIIV

SEQ ID NO: 38403 - protein, 16 aa, BK virus
IINKSIYTRKQNIIVL

SEQ ID NO: 38404 - protein, 16 aa, BK virus
INKSIYTRKQNIIVLI

SEQ ID NO: 38405 - protein, 16 aa, BK virus
NKSIYTRKQNIIVLIW

SEQ ID NO: 38406 - protein, 16 aa, BK virus
KSIYTRKQNIIVLIWV

SEQ ID NO: 38407 - protein, 16 aa, BK virus
SIYTRKQNIIVLIWVK

SEQ ID NO: 38408 - protein, 16 aa, BK virus
IYTRKQNIIVLIWVKQ

SEQ ID NO: 38409 - protein, 16 aa, BK virus
YTRKQNIIVLIWVKQF

SEQ ID NO: 38410 - protein, 16 aa, BK virus
TRKQNIIVLIWVKQFQ

SEQ ID NO: 38411 - protein, 16 aa, BK virus
RKQNIIVLIWVKQFQS

SEQ ID NO: 38412 - protein, 16 aa, BK virus
KQNIIVLIWVKQFQSH

SEQ ID NO: 38413 - protein, 16 aa, BK virus
QNIIVLIWVKQFQSHA

SEQ ID NO: 38414 - protein, 16 aa, BK virus
LLIEAYSGNFVIPIIK

SEQ ID NO: 38415 - protein, 16 aa, BK virus
LIEAYSGNFVIPIIKE

SEQ ID NO: 38416 - protein, 16 aa, BK virus
IEAYSGNFVIPIIKEL

SEQ ID NO: 38417 - protein, 16 aa, BK virus
EAYSGNFVIPIIKELI

SEQ ID NO: 38418 - protein, 16 aa, BK virus
AYSGNFVIPIIKELIP

SEQ ID NO: 38419 - protein, 16 aa, BK virus
YSGNFVIPIIKELIPY

SEQ ID NO: 38420 - protein, 16 aa, BK virus
SGNFVIPIIKELIPYL

SEQ ID NO: 38421 - protein, 16 aa, BK virus
GNFVIPIIKELIPYLS

SEQ ID NO: 38422 - protein, 16 aa, BK virus
SSKPSNSPRSTSNYSI

SEQ ID NO: 38423 - protein, 16 aa, BK virus
SKPSNSPRSTSNYSIC

SEQ ID NO: 38424 - protein, 16 aa, BK virus
KPSNSPRSTSNYSICL

SEQ ID NO: 38425 - protein, 16 aa, BK virus
PSNSPRSTSNYSICLR

SEQ ID NO: 38426 - protein, 16 aa, BK virus
SNSPRSTSNYSICLRS

SEQ ID NO: 38427 - protein, 16 aa, BK virus
GTCYALYSSKGCNLNF

SEQ ID NO: 38428 - protein, 16 aa, BK virus
TCYALYSSKGCNLNFY

SEQ ID NO: 38429 - protein, 16 aa, BK virus
CYALYSSKGCNLNFYS

SEQ ID NO: 38430 - protein, 16 aa, BK virus
YALYSSKGCNLNFYSS

SEQ ID NO: 38431 - protein, 16 aa, BK virus
ALYSSKGCNLNFYSSS

SEQ ID NO: 38432 - protein, 16 aa, BK virus
LYSSKGCNLNFYSSSS

SEQ ID NO: 38433 - protein, 16 aa, BK virus
YSSKGCNLNFYSSSSL

SEQ ID NO: 38434 - protein, 16 aa, BK virus
SSKGCNLNFYSSSSLP

SEQ ID NO: 38435 - protein, 16 aa, BK virus
SKGCNLNFYSSSSLPS

SEQ ID NO: 38436 - protein, 16 aa, BK virus
KGCNLNFYSSSSLPSS

SEQ ID NO: 38437 - protein, 16 aa, BK virus
GCNLNFYSSSSLPSSN

SEQ ID NO: 38438 - protein, 16 aa, BK virus
CNLNFYSSSSLPSSNF

SEQ ID NO: 38439 - protein, 16 aa, BK virus
NLNFYSSSSLPSSNFS

SEQ ID NO: 38440 - protein, 16 aa, BK virus
LNFYSSSSLPSSNFSH

SEQ ID NO: 38441 - protein, 16 aa, BK virus
SSTHEPGNTKKKGLLT

SEQ ID NO: 38442 - protein, 16 aa, BK virus
ESFTESFTAGKAVVLL

SEQ ID NO: 38443 - protein, 16 aa, BK virus
SFTESFTAGKAVVLLF

SEQ ID NO: 38444 - protein, 16 aa, BK virus
FTESFTAGKAVVLLFF

SEQ ID NO: 38445 - protein, 16 aa, BK virus
TESFTAGKAVVLLFFP

SEQ ID NO: 38446 - protein, 16 aa, BK virus
ESFTAGKAVVLLFFPS

SEQ ID NO: 38447 - protein, 16 aa, BK virus
SFTAGKAVVLLFFPST

SEQ ID NO: 38448 - protein, 16 aa, BK virus
FTAGKAVVLLFFPSTL

SEQ ID NO: 38449 - protein, 16 aa, BK virus
TAGKAVVLLFFPSTLS

SEQ ID NO: 38450 - protein, 16 aa, BK virus
AGKAVVLLFFPSTLSS

SEQ ID NO: 38451 - protein, 16 aa, BK virus
GKAVVLLFFPSTLSSP

SEQ ID NO: 38452 - protein, 16 aa, BK virus
KAVVLLFFPSTLSSPL

SEQ ID NO: 38453 - protein, 16 aa, BK virus
AVVLLFFPSTLSSPLQ

SEQ ID NO: 38454 - protein, 16 aa, BK virus
VVLLFFPSTLSSPLQN

SEQ ID NO: 38455 - protein, 16 aa, BK virus
VLLFFPSTLSSPLQNS

SEQ ID NO: 38456 - protein, 16 aa, BK virus
LLFFPSTLSSPLQNSS

SEQ ID NO: 38457 - protein, 16 aa, BK virus
LFFPSTLSSPLQNSSK

SEQ ID NO: 38458 - protein, 16 aa, BK virus
FFPSTLSSPLQNSSKS

SEQ ID NO: 38459 - protein, 16 aa, BK virus
FPSTLSSPLQNSSKSS

SEQ ID NO: 38460 - protein, 16 aa, BK virus
PSTLSSPLQNSSKSSK

SEQ ID NO: 38461 - protein, 16 aa, BK virus
STLSSPLQNSSKSSKI

SEQ ID NO: 38462 - protein, 16 aa, BK virus
TLSSPLQNSSKSSKIK

SEQ ID NO: 38463 - protein, 16 aa, BK virus
LSSPLQNSSKSSKIKI

SEQ ID NO: 38464 - protein, 16 aa, BK virus
SSPLQNSSKSSKIKIK

SEQ ID NO: 38465 - protein, 16 aa, BK virus
SPLQNSSKSSKIKIKI

SEQ ID NO: 38466 - protein, 16 aa, BK virus
PLQNSSKSSKIKIKIL

SEQ ID NO: 38467 - protein, 16 aa, BK virus
ALFFVPVQVLPTFTEA

SEQ ID NO: 38468 - protein, 16 aa, BK virus
LFFVPVQVLPTFTEAC

SEQ ID NO: 38469 - protein, 16 aa, BK virus
FFVPVQVLPTFTEACR

SEQ ID NO: 38470 - protein, 16 aa, BK virus
FVPVQVLPTFTEACRD

SEQ ID NO: 38471 - protein, 16 aa, BK virus
VPVQVLPTFTEACRDS

SEQ ID NO: 38472 - protein, 16 aa, BK virus
PVQVLPTFTEACRDSW

SEQ ID NO: 38473 - protein, 16 aa, BK virus
VQVLPTFTEACRDSWR

SEQ ID NO: 38474 - protein, 16 aa, BK virus
QVLPTFTEACRDSWRR

SEQ ID NO: 38475 - protein, 16 aa, BK virus
VLPTFTEACRDSWRRT

SEQ ID NO: 38476 - protein, 16 aa, BK virus
LPTFTEACRDSWRRTM

SEQ ID NO: 38477 - protein, 16 aa, BK virus
PTFTEACRDSWRRTMA

SEQ ID NO: 38478 - protein, 16 aa, BK virus
TFTEACRDSWRRTMAF

SEQ ID NO: 38479 - protein, 16 aa, BK virus
FTEACRDSWRRTMAFV

SEQ ID NO: 38480 - protein, 16 aa, BK virus
TEACRDSWRRTMAFVQ

SEQ ID NO: 38481 - protein, 16 aa, BK virus
EACRDSWRRTMAFVQF

SEQ ID NO: 38482 - protein, 16 aa, BK virus
ACRDSWRRTMAFVQFN

SEQ ID NO: 38483 - protein, 16 aa, BK virus
CRDSWRRTMAFVQFNW

SEQ ID NO: 38484 - protein, 16 aa, BK virus
RDSWRRTMAFVQFNWG

SEQ ID NO: 38485 - protein, 16 aa, BK virus
DSWRRTMAFVQFNWGQ

SEQ ID NO: 38486 - protein, 16 aa, BK virus
SWRRTMAFVQFNWGQG

SEQ ID NO: 38487 - protein, 16 aa, BK virus
WRRTMAFVQFNWGQGQ

SEQ ID NO: 38488 - protein, 16 aa, BK virus
RRTMAFVQFNWGQGQD

SEQ ID NO: 38489 - protein, 16 aa, BK virus
RTMAFVQFNWGQGQDS

SEQ ID NO: 38490 - protein, 16 aa, BK virus
ARKTCLSCTFLPEVMV

SEQ ID NO: 38491 - protein, 16 aa, BK virus
RKTCLSCTFLPEVMVW

SEQ ID NO: 38492 - protein, 16 aa, BK virus
KTCLSCTFLPEVMVWL

SEQ ID NO: 38493 - protein, 16 aa, BK virus
TCLSCTFLPEVMVWLH

SEQ ID NO: 38494 - protein, 16 aa, BK virus
CLSCTFLPEVMVWLHS

SEQ ID NO: 38495 - protein, 16 aa, BK virus
LSCTFLPEVMVWLHSM

SEQ ID NO: 38496 - protein, 16 aa, BK virus
SCTFLPEVMVWLHSMG

SEQ ID NO: 38497 - protein, 16 aa, BK virus
CTFLPEVMVWLHSMGK

SEQ ID NO: 38498 - protein, 16 aa, BK virus
TFLPEVMVWLHSMGKQ

SEQ ID NO: 38499 - protein, 16 aa, BK virus
FLPEVMVWLHSMGKQL

SEQ ID NO: 38500 - protein, 16 aa, BK virus
LPEVMVWLHSMGKQLL

SEQ ID NO: 38501 - protein, 16 aa, BK virus
PEVMVWLHSMGKQLLP

SEQ ID NO: 38502 - protein, 16 aa, BK virus
EVMVWLHSMGKQLLPV

SEQ ID NO: 38503 - protein, 16 aa, BK virus
VMVWLHSMGKQLLPVS

SEQ ID NO: 38504 - protein, 16 aa, BK virus
MVWLHSMGKQLLPVSH

SEQ ID NO: 38505 - protein, 16 aa, BK virus
VWLHSMGKQLLPVSHA

SEQ ID NO: 38506 - protein, 16 aa, BK virus
WLHSMGKQLLPVSHAL

SEQ ID NO: 38507 - protein, 16 aa, BK virus
LHSMGKQLLPVSHALS

SEQ ID NO: 38508 - protein, 16 aa, BK virus
HSMGKQLLPVSHALSF

SEQ ID NO: 38509 - protein, 16 aa, BK virus
SMGKQLLPVSHALSFL

SEQ ID NO: 38510 - protein, 16 aa, BK virus
MGKQLLPVSHALSFLR

SEQ ID NO: 38511 - protein, 16 aa, BK virus
GKQLLPVSHALSFLRS

SEQ ID NO: 38512 - protein, 16 aa, BK virus
KQLLPVSHALSFLRSW

SEQ ID NO: 38513 - protein, 16 aa, BK virus
QLLPVSHALSFLRSWF

SEQ ID NO: 38514 - protein, 16 aa, BK virus
LLPVSHALSFLRSWFG

SEQ ID NO: 38515 - protein, 16 aa, BK virus
LPVSHALSFLRSWFGC

SEQ ID NO: 38516 - protein, 16 aa, BK virus
PVSHALSFLRSWFGCI

SEQ ID NO: 38517 - protein, 16 aa, BK virus
VSHALSFLRSWFGCIP

SEQ ID NO: 38518 - protein, 16 aa, BK virus
SHALSFLRSWFGCIPL

SEQ ID NO: 38519 - protein, 16 aa, BK virus
GLAKLFGEIPILLQFL

SEQ ID NO: 38520 - protein, 16 aa, BK virus
LAKLFGEIPILLQFLQ

SEQ ID NO: 38521 - protein, 13 aa, BK virus
WIKFLTGKNPWSS

SEQ ID NO: 38522 - protein, 13 aa, BK virus
IKFLTGKNPWSSW

SEQ ID NO: 38523 - protein, 13 aa, BK virus
KFLTGKNPWSSWT

SEQ ID NO: 38524 - protein, 13 aa, BK virus
FLTGKNPWSSWTF

SEQ ID NO: 38525 - protein, 13 aa, BK virus
GSVRNFTLTKGAT

SEQ ID NO: 38526 - protein, 13 aa, BK virus
SVRNFTLTKGATR

SEQ ID NO: 38527 - protein, 13 aa, BK virus
VRNFTLTKGATRI

SEQ ID NO: 38528 - protein, 13 aa, BK virus
RNFTLTKGATRIK

SEQ ID NO: 38529 - protein, 13 aa, BK virus
LISLILEPGVAQR

SEQ ID NO: 38530 - protein, 13 aa, BK virus
ISLILEPGVAQRF

SEQ ID NO: 38531 - protein, 13 aa, BK virus
SLILEPGVAQRFV

SEQ ID NO: 38532 - protein, 13 aa, BK virus
LILEPGVAQRFVL

SEQ ID NO: 38533 - protein, 13 aa, BK virus
ILEPGVAQRFVLI

SEQ ID NO: 38534 - protein, 13 aa, BK virus
LEPGVAQRFVLIF

SEQ ID NO: 38535 - protein, 13 aa, BK virus
EPGVAQRFVLIFL

SEQ ID NO: 38536 - protein, 13 aa, BK virus
PGVAQRFVLIFLF

SEQ ID NO: 38537 - protein, 13 aa, BK virus
GVAQRFVLIFLFA

SEQ ID NO: 38538 - protein, 13 aa, BK virus
VAQRFVLIFLFAQ

SEQ ID NO: 38539 - protein, 13 aa, BK virus
AQRFVLIFLFAQI

SEQ ID NO: 38540 - protein, 13 aa, BK virus
QRFVLIFLFAQIP

SEQ ID NO: 38541 - protein, 13 aa, BK virus
RFVLIFLFAQIPC

SEQ ID NO: 38542 - protein, 13 aa, BK virus
FVLIFLFAQIPCT

SEQ ID NO: 38543 - protein, 13 aa, BK virus
VLIFLFAQIPCTA

SEQ ID NO: 38544 - protein, 13 aa, BK virus
LIFLFAQIPCTAR

SEQ ID NO: 38545 - protein, 13 aa, BK virus
IFLFAQIPCTARN

SEQ ID NO: 38546 - protein, 13 aa, BK virus
FLFAQIPCTARNG

SEQ ID NO: 38547 - protein, 13 aa, BK virus
LFAQIPCTARNGL

SEQ ID NO: 38548 - protein, 13 aa, BK virus
FAQIPCTARNGLF

SEQ ID NO: 38549 - protein, 13 aa, BK virus
AQIPCTARNGLFV

SEQ ID NO: 38550 - protein, 13 aa, BK virus
QIPCTARNGLFVP

SEQ ID NO: 38551 - protein, 13 aa, BK virus
IPCTARNGLFVPK

SEQ ID NO: 38552 - protein, 13 aa, BK virus
PCTARNGLFVPKS

SEQ ID NO: 38553 - protein, 13 aa, BK virus
CTARNGLFVPKSL

SEQ ID NO: 38554 - protein, 13 aa, BK virus
TARNGLFVPKSLL

SEQ ID NO: 38555 - protein, 13 aa, BK virus
ARNGLFVPKSLLC

SEQ ID NO: 38556 - protein, 13 aa, BK virus
RNGLFVPKSLLCT

SEQ ID NO: 38557 - protein, 13 aa, BK virus
NGLFVPKSLLCTA

SEQ ID NO: 38558 - protein, 13 aa, BK virus
GLFVPKSLLCTAL

SEQ ID NO: 38559 - protein, 13 aa, BK virus
LFVPKSLLCTALA

SEQ ID NO: 38560 - protein, 13 aa, BK virus
FVPKSLLCTALAC

SEQ ID NO: 38561 - protein, 13 aa, BK virus
VPKSLLCTALACY

SEQ ID NO: 38562 - protein, 13 aa, BK virus
PKSLLCTALACYV

SEQ ID NO: 38563 - protein, 13 aa, BK virus
KSLLCTALACYVS

SEQ ID NO: 38564 - protein, 13 aa, BK virus
SLLCTALACYVSL

SEQ ID NO: 38565 - protein, 13 aa, BK virus
LLCTALACYVSLD

SEQ ID NO: 38566 - protein, 13 aa, BK virus
IATALTASHSGLA

SEQ ID NO: 38567 - protein, 13 aa, BK virus
VIIFFIGANLWNR

SEQ ID NO: 38568 - protein, 13 aa, BK virus
IIFFIGANLWNRR

SEQ ID NO: 38569 - protein, 13 aa, BK virus
IFFIGANLWNRRV

SEQ ID NO: 38570 - protein, 13 aa, BK virus
FFIGANLWNRRVG

SEQ ID NO: 38571 - protein, 13 aa, BK virus
FIGANLWNRRVGV

SEQ ID NO: 38572 - protein, 13 aa, BK virus
IGANLWNRRVGVL

SEQ ID NO: 38573 - protein, 13 aa, BK virus
GANLWNRRVGVLV

SEQ ID NO: 38574 - protein, 13 aa, BK virus
ANLWNRRVGVLVE

SEQ ID NO: 38575 - protein, 13 aa, BK virus
NLWNRRVGVLVEF

SEQ ID NO: 38576 - protein, 13 aa, BK virus
LWNRRVGVLVEFL

SEQ ID NO: 38577 - protein, 13 aa, BK virus
RSNSRFSTLNTTQ

SEQ ID NO: 38578 - protein, 13 aa, BK virus
SNSRFSTLNTTQK

SEQ ID NO: 38579 - protein, 13 aa, BK virus
NSRFSTLNTTQKK

SEQ ID NO: 38580 - protein, 13 aa, BK virus
SRFSTLNTTQKKK

SEQ ID NO: 38581 - protein, 13 aa, BK virus
RFSTLNTTQKKKK

SEQ ID NO: 38582 - protein, 13 aa, BK virus
FSTLNTTQKKKKG

SEQ ID NO: 38583 - protein, 13 aa, BK virus
STLNTTQKKKKGR

SEQ ID NO: 38584 - protein, 13 aa, BK virus
TLNTTQKKKKGRR

SEQ ID NO: 38585 - protein, 13 aa, BK virus
LNTTQKKKKGRRP

SEQ ID NO: 38586 - protein, 13 aa, BK virus
RSIPYYRRKHSRG

SEQ ID NO: 38587 - protein, 13 aa, BK virus
SIPYYRRKHSRGL

SEQ ID NO: 38588 - protein, 13 aa, BK virus
IPYYRRKHSRGLK

SEQ ID NO: 38589 - protein, 13 aa, BK virus
PYYRRKHSRGLKG

SEQ ID NO: 38590 - protein, 13 aa, BK virus
YYRRKHSRGLKGA

SEQ ID NO: 38591 - protein, 13 aa, BK virus
GCVFIIRYVFRIS

SEQ ID NO: 38592 - protein, 13 aa, BK virus
CVFIIRYVFRISI

SEQ ID NO: 38593 - protein, 13 aa, BK virus
VFIIRYVFRISIQ

SEQ ID NO: 38594 - protein, 13 aa, BK virus
FIIRYVFRISIQC

SEQ ID NO: 38595 - protein, 13 aa, BK virus
IIRYVFRISIQCR

SEQ ID NO: 38596 - protein, 13 aa, BK virus
IRYVFRISIQCRG

SEQ ID NO: 38597 - protein, 13 aa, BK virus
RYVFRISIQCRGV

SEQ ID NO: 38598 - protein, 13 aa, BK virus
KSKKYLSASSRYS

SEQ ID NO: 38599 - protein, 13 aa, BK virus
SKKYLSASSRYSF

SEQ ID NO: 38600 - protein, 13 aa, BK virus
KKYLSASSRYSFS

SEQ ID NO: 38601 - protein, 13 aa, BK virus
KKSRYPSYDQGRN

SEQ ID NO: 38602 - protein, 13 aa, BK virus
KSRYPSYDQGRNA

SEQ ID NO: 38603 - protein, 13 aa, BK virus
SRYPSYDQGRNAN

SEQ ID NO: 38604 - protein, 13 aa, BK virus
RYPSYDQGRNANR

SEQ ID NO: 38605 - protein, 13 aa, BK virus
YPSYDQGRNANRK

SEQ ID NO: 38606 - protein, 13 aa, BK virus
PSYDQGRNANRKI

SEQ ID NO: 38607 - protein, 13 aa, BK virus
SYDQGRNANRKIQ

SEQ ID NO: 38608 - protein, 13 aa, BK virus
YDQGRNANRKIQS

SEQ ID NO: 38609 - protein, 13 aa, BK virus
DQGRNANRKIQSY

SEQ ID NO: 38610 - protein, 13 aa, BK virus
QGRNANRKIQSYI

SEQ ID NO: 38611 - protein, 13 aa, BK virus
GRNANRKIQSYIR

SEQ ID NO: 38612 - protein, 13 aa, BK virus
NGFNIWSSWKCCT

SEQ ID NO: 38613 - protein, 13 aa, BK virus
GFNIWSSWKCCTR

SEQ ID NO: 38614 - protein, 13 aa, BK virus
FNIWSSWKCCTRT

SEQ ID NO: 38615 - protein, 13 aa, BK virus
NIWSSWKCCTRTI

SEQ ID NO: 38616 - protein, 13 aa, BK virus
IWSSWKCCTRTIY

SEQ ID NO: 38617 - protein, 13 aa, BK virus
WSSWKCCTRTIYG

SEQ ID NO: 38618 - protein, 13 aa, BK virus
SSWKCCTRTIYGR

SEQ ID NO: 38619 - protein, 13 aa, BK virus
SWKCCTRTIYGRC

SEQ ID NO: 38620 - protein, 13 aa, BK virus
WKCCTRTIYGRCC

SEQ ID NO: 38621 - protein, 13 aa, BK virus
KCCTRTIYGRCCL

SEQ ID NO: 38622 - protein, 13 aa, BK virus
CCTRTIYGRCCLA

SEQ ID NO: 38623 - protein, 13 aa, BK virus
CTRTIYGRCCLAA

SEQ ID NO: 38624 - protein, 13 aa, BK virus
TRTIYGRCCLAAL

SEQ ID NO: 38625 - protein, 13 aa, BK virus
RTIYGRCCLAALF

SEQ ID NO: 38626 - protein, 13 aa, BK virus
TIYGRCCLAALFA

SEQ ID NO: 38627 - protein, 13 aa, BK virus
IYGRCCLAALFAT

SEQ ID NO: 38628 - protein, 13 aa, BK virus
WKNNTSCRVIRFV

SEQ ID NO: 38629 - protein, 13 aa, BK virus
KNNTSCRVIRFVW

SEQ ID NO: 38630 - protein, 13 aa, BK virus
NNTSCRVIRFVWW

SEQ ID NO: 38631 - protein, 13 aa, BK virus
SLKCKPTHGKANL

SEQ ID NO: 38632 - protein, 13 aa, BK virus
IKGFAFRTWNKQF

SEQ ID NO: 38633 - protein, 13 aa, BK virus
KGFAFRTWNKQFR

SEQ ID NO: 38634 - protein, 13 aa, BK virus
GFAFRTWNKQFRQ

SEQ ID NO: 38635 - protein, 13 aa, BK virus
FAFRTWNKQFRQF

SEQ ID NO: 38636 - protein, 13 aa, BK virus
AFRTWNKQFRQFE

SEQ ID NO: 38637 - protein, 13 aa, BK virus
FRTWNKQFRQFER

SEQ ID NO: 38638 - protein, 13 aa, BK virus
RTWNKQFRQFERL

SEQ ID NO: 38639 - protein, 13 aa, BK virus
TWNKQFRQFERLF

SEQ ID NO: 38640 - protein, 13 aa, BK virus
WNKQFRQFERLFR

SEQ ID NO: 38641 - protein, 13 aa, BK virus
NKQFRQFERLFRW

SEQ ID NO: 38642 - protein, 13 aa, BK virus
KQFRQFERLFRWK

SEQ ID NO: 38643 - protein, 13 aa, BK virus
QFRQFERLFRWKC

SEQ ID NO: 38644 - protein, 13 aa, BK virus
GKFRKETFKQKNP

SEQ ID NO: 38645 - protein, 13 aa, BK virus
KFRKETFKQKNPN

SEQ ID NO: 38646 - protein, 13 aa, BK virus
FRKETFKQKNPNI

SEQ ID NO: 38647 - protein, 13 aa, BK virus
RKETFKQKNPNIS

SEQ ID NO: 38648 - protein, 13 aa, BK virus
KETFKQKNPNIST

SEQ ID NO: 38649 - protein, 13 aa, BK virus
ETFKQKNPNISTR

SEQ ID NO: 38650 - protein, 13 aa, BK virus
TFKQKNPNISTRL

SEQ ID NO: 38651 - protein, 13 aa, BK virus
FKQKNPNISTRLG

SEQ ID NO: 38652 - protein, 13 aa, BK virus
KQKNPNISTRLGY

SEQ ID NO: 38653 - protein, 13 aa, BK virus
QKNPNISTRLGYN

SEQ ID NO: 38654 - protein, 13 aa, BK virus
KNPNISTRLGYNE

SEQ ID NO: 38655 - protein, 13 aa, BK virus
AQNIFKKILTKLR

SEQ ID NO: 38656 - protein, 13 aa, BK virus
QNIFKKILTKLRV

SEQ ID NO: 38657 - protein, 13 aa, BK virus
NIFKKILTKLRVL

SEQ ID NO: 38658 - protein, 13 aa, BK virus
IFKKILTKLRVLT

SEQ ID NO: 38659 - protein, 13 aa, BK virus
KKNFTKWNDLVAT

SEQ ID NO: 38660 - protein, 13 aa, BK virus
KNFTKWNDLVATA

SEQ ID NO: 38661 - protein, 13 aa, BK virus
NFTKWNDLVATAN

SEQ ID NO: 38662 - protein, 13 aa, BK virus
FTKWNDLVATANL

SEQ ID NO: 38663 - protein, 13 aa, BK virus
TKWNDLVATANLV

SEQ ID NO: 38664 - protein, 13 aa, BK virus
IPITMLFPSLRYF

SEQ ID NO: 38665 - protein, 13 aa, BK virus
PITMLFPSLRYFS

SEQ ID NO: 38666 - protein, 13 aa, BK virus
ITMLFPSLRYFSP

SEQ ID NO: 38667 - protein, 13 aa, BK virus
TMLFPSLRYFSPC

SEQ ID NO: 38668 - protein, 13 aa, BK virus
KWLIQKQHLLNVY

SEQ ID NO: 38669 - protein, 13 aa, BK virus
WLIQKQHLLNVYV

SEQ ID NO: 38670 - protein, 13 aa, BK virus
LIQKQHLLNVYVQ

SEQ ID NO: 38671 - protein, 13 aa, BK virus
KHLFKAFWFAIVP

SEQ ID NO: 38672 - protein, 13 aa, BK virus
HLFKAFWFAIVPV

SEQ ID NO: 38673 - protein, 13 aa, BK virus
LFKAFWFAIVPVC

SEQ ID NO: 38674 - protein, 13 aa, BK virus
FKAFWFAIVPVCQ

SEQ ID NO: 38675 - protein, 13 aa, BK virus
KAFWFAIVPVCQY

SEQ ID NO: 38676 - protein, 13 aa, BK virus
AFWFAIVPVCQYI

SEQ ID NO: 38677 - protein, 13 aa, BK virus
FWFAIVPVCQYIL

SEQ ID NO: 38678 - protein, 13 aa, BK virus
WFAIVPVCQYILS

SEQ ID NO: 38679 - protein, 13 aa, BK virus
FAIVPVCQYILSY

SEQ ID NO: 38680 - protein, 13 aa, BK virus
AIVPVCQYILSYL

SEQ ID NO: 38681 - protein, 13 aa, BK virus
IVPVCQYILSYLG

SEQ ID NO: 38682 - protein, 13 aa, BK virus
VPVCQYILSYLGP

SEQ ID NO: 38683 - protein, 13 aa, BK virus
PVCQYILSYLGPL

SEQ ID NO: 38684 - protein, 13 aa, BK virus
VCQYILSYLGPLE

SEQ ID NO: 38685 - protein, 13 aa, BK virus
CQYILSYLGPLEV

SEQ ID NO: 38686 - protein, 13 aa, BK virus
QYILSYLGPLEVF

SEQ ID NO: 38687 - protein, 13 aa, BK virus
YILSYLGPLEVFL

SEQ ID NO: 38688 - protein, 13 aa, BK virus
ILSYLGPLEVFLC

SEQ ID NO: 38689 - protein, 13 aa, BK virus
LSYLGPLEVFLCH

SEQ ID NO: 38690 - protein, 13 aa, BK virus
SYLGPLEVFLCHQ

SEQ ID NO: 38691 - protein, 13 aa, BK virus
YLGPLEVFLCHQT

SEQ ID NO: 38692 - protein, 13 aa, BK virus
LGPLEVFLCHQTP

SEQ ID NO: 38693 - protein, 13 aa, BK virus
GHLAKRKLGKDSL

SEQ ID NO: 38694 - protein, 13 aa, BK virus
HLAKRKLGKDSLQ

SEQ ID NO: 38695 - protein, 13 aa, BK virus
LAKRKLGKDSLQI

SEQ ID NO: 38696 - protein, 13 aa, BK virus
AKRKLGKDSLQIF

SEQ ID NO: 38697 - protein, 13 aa, BK virus
KRKLGKDSLQIFF

SEQ ID NO: 38698 - protein, 13 aa, BK virus
RKLGKDSLQIFFS

SEQ ID NO: 38699 - protein, 13 aa, BK virus
KLGKDSLQIFFSG

SEQ ID NO: 38700 - protein, 13 aa, BK virus
LGKDSLQIFFSGG

SEQ ID NO: 38701 - protein, 13 aa, BK virus
GKDSLQIFFSGGS

SEQ ID NO: 38702 - protein, 13 aa, BK virus
NILQGLSTVVFQS

SEQ ID NO: 38703 - protein, 13 aa, BK virus
ILQGLSTVVFQSC

SEQ ID NO: 38704 - protein, 13 aa, BK virus
TGHKYQQLKHTGY

SEQ ID NO: 38705 - protein, 13 aa, BK virus
GHKYQQLKHTGYQ

SEQ ID NO: 38706 - protein, 13 aa, BK virus
HKYQQLKHTGYQL

SEQ ID NO: 38707 - protein, 13 aa, BK virus
KYQQLKHTGYQLY

SEQ ID NO: 38708 - protein, 13 aa, BK virus
YQQLKHTGYQLYK

SEQ ID NO: 38709 - protein, 13 aa, BK virus
QQLKHTGYQLYKE

SEQ ID NO: 38710 - protein, 13 aa, BK virus
QLKHTGYQLYKEA

SEQ ID NO: 38711 - protein, 13 aa, BK virus
LKHTGYQLYKEAP

SEQ ID NO: 38712 - protein, 13 aa, BK virus
KHTGYQLYKEAPH

SEQ ID NO: 38713 - protein, 13 aa, BK virus
HTGYQLYKEAPHP

SEQ ID NO: 38714 - protein, 13 aa, BK virus
TGYQLYKEAPHPV

SEQ ID NO: 38715 - protein, 13 aa, BK virus
GYQLYKEAPHPVH

SEQ ID NO: 38716 - protein, 13 aa, BK virus
YQLYKEAPHPVHL

SEQ ID NO: 38717 - protein, 13 aa, BK virus
QLYKEAPHPVHLA

SEQ ID NO: 38718 - protein, 13 aa, BK virus
LYKEAPHPVHLAT

SEQ ID NO: 38719 - protein, 13 aa, BK virus
YKEAPHPVHLATL

SEQ ID NO: 38720 - protein, 13 aa, BK virus
KEAPHPVHLATLW

SEQ ID NO: 38721 - protein, 13 aa, BK virus
LCWSHEVLGEHFP

SEQ ID NO: 38722 - protein, 13 aa, BK virus
CWSHEVLGEHFPL

SEQ ID NO: 38723 - protein, 13 aa, BK virus
WSHEVLGEHFPLL

SEQ ID NO: 38724 - protein, 13 aa, BK virus
HFHFYWDQVPSTQ

SEQ ID NO: 38725 - protein, 13 aa, BK virus
FHFYWDQVPSTQL

SEQ ID NO: 38726 - protein, 13 aa, BK virus
HFYWDQVPSTQLD

SEQ ID NO: 38727 - protein, 13 aa, BK virus
FYWDQVPSTQLDK

SEQ ID NO: 38728 - protein, 13 aa, BK virus
YWDQVPSTQLDKH

SEQ ID NO: 38729 - protein, 13 aa, BK virus
WDQVPSTQLDKHC

SEQ ID NO: 38730 - protein, 13 aa, BK virus
DQVPSTQLDKHCF

SEQ ID NO: 38731 - protein, 13 aa, BK virus
QVPSTQLDKHCFC

SEQ ID NO: 38732 - protein, 13 aa, BK virus
VPSTQLDKHCFCP

SEQ ID NO: 38733 - protein, 13 aa, BK virus
PSTQLDKHCFCPN

SEQ ID NO: 38734 - protein, 13 aa, BK virus
STQLDKHCFCPNR

SEQ ID NO: 38735 - protein, 13 aa, BK virus
TQLDKHCFCPNRP

SEQ ID NO: 38736 - protein, 13 aa, BK virus
QLDKHCFCPNRPY

SEQ ID NO: 38737 - protein, 13 aa, BK virus
LDKHCFCPNRPYG

SEQ ID NO: 38738 - protein, 13 aa, BK virus
DKHCFCPNRPYGQ

SEQ ID NO: 38739 - protein, 13 aa, BK virus
KHCFCPNRPYGQY

SEQ ID NO: 38740 - protein, 13 aa, BK virus
HCFCPNRPYGQYS

SEQ ID NO: 38741 - protein, 13 aa, BK virus
CFCPNRPYGQYSL

SEQ ID NO: 38742 - protein, 13 aa, BK virus
FCPNRPYGQYSLP

SEQ ID NO: 38743 - protein, 13 aa, BK virus
CPNRPYGQYSLPG

SEQ ID NO: 38744 - protein, 13 aa, BK virus
PNRPYGQYSLPGT

SEQ ID NO: 38745 - protein, 13 aa, BK virus
NRPYGQYSLPGTG

SEQ ID NO: 38746 - protein, 13 aa, BK virus
RPYGQYSLPGTGL

SEQ ID NO: 38747 - protein, 13 aa, BK virus
PYGQYSLPGTGLL

SEQ ID NO: 38748 - protein, 13 aa, BK virus
YGQYSLPGTGLLG

SEQ ID NO: 38749 - protein, 13 aa, BK virus
GQYSLPGTGLLGF

SEQ ID NO: 38750 - protein, 13 aa, BK virus
YHQGTLTCNSLAL

SEQ ID NO: 38751 - protein, 13 aa, BK virus
HQGTLTCNSLALP

SEQ ID NO: 38752 - protein, 13 aa, BK virus
QGTLTCNSLALPA

SEQ ID NO: 38753 - protein, 13 aa, BK virus
GTLTCNSLALPAF

SEQ ID NO: 38754 - protein, 13 aa, BK virus
TLTCNSLALPAFP

SEQ ID NO: 38755 - protein, 13 aa, BK virus
LTCNSLALPAFPR

SEQ ID NO: 38756 - protein, 13 aa, BK virus
TCNSLALPAFPRV

SEQ ID NO: 38757 - protein, 13 aa, BK virus
CNSLALPAFPRVL

SEQ ID NO: 38758 - protein, 13 aa, BK virus
NSLALPAFPRVLH

SEQ ID NO: 38759 - protein, 13 aa, BK virus
SLALPAFPRVLHL

SEQ ID NO: 38760 - protein, 13 aa, BK virus
LALPAFPRVLHLQ

SEQ ID NO: 38761 - protein, 13 aa, BK virus
ALPAFPRVLHLQQ

SEQ ID NO: 38762 - protein, 13 aa, BK virus
LPAFPRVLHLQQR

SEQ ID NO: 38763 - protein, 13 aa, BK virus
PAFPRVLHLQQRS

SEQ ID NO: 38764 - protein, 13 aa, BK virus
AFPRVLHLQQRSG

SEQ ID NO: 38765 - protein, 13 aa, BK virus
FPRVLHLQQRSGN

SEQ ID NO: 38766 - protein, 13 aa, BK virus
PRVLHLQQRSGNY

SEQ ID NO: 38767 - protein, 13 aa, BK virus
RVLHLQQRSGNYC

SEQ ID NO: 38768 - protein, 13 aa, BK virus
VLHLQQRSGNYCL

SEQ ID NO: 38769 - protein, 13 aa, BK virus
LHLQQRSGNYCLE

SEQ ID NO: 38770 - protein, 13 aa, BK virus
VFLHHAHALFVTL

SEQ ID NO: 38771 - protein, 13 aa, BK virus
FLHHAHALFVTLH

SEQ ID NO: 38772 - protein, 13 aa, BK virus
LHHAHALFVTLHE

SEQ ID NO: 38773 - protein, 13 aa, BK virus
HHAHALFVTLHEG

SEQ ID NO: 38774 - protein, 13 aa, BK virus
PLFVQLQPPTSVD

SEQ ID NO: 38775 - protein, 13 aa, BK virus
LFVQLQPPTSVDF

SEQ ID NO: 38776 - protein, 13 aa, BK virus
FVQLQPPTSVDFH

SEQ ID NO: 38777 - protein, 13 aa, BK virus
VQLQPPTSVDFHR

SEQ ID NO: 38778 - protein, 13 aa, BK virus
QLQPPTSVDFHRL

SEQ ID NO: 38779 - protein, 13 aa, BK virus
LQPPTSVDFHRLG

SEQ ID NO: 38780 - protein, 13 aa, BK virus
QPPTSVDFHRLGP

SEQ ID NO: 38781 - protein, 13 aa, BK virus
PPTSVDFHRLGPH

SEQ ID NO: 38782 - protein, 13 aa, BK virus
PTSVDFHRLGPHL

SEQ ID NO: 38783 - protein, 13 aa, BK virus
TSVDFHRLGPHLN

SEQ ID NO: 38784 - protein, 13 aa, BK virus
SVDFHRLGPHLNW

SEQ ID NO: 38785 - protein, 13 aa, BK virus
VDFHRLGPHLNWG

SEQ ID NO: 38786 - protein, 13 aa, BK virus
DFHRLGPHLNWGG

SEQ ID NO: 38787 - protein, 13 aa, BK virus
FHRLGPHLNWGGE

SEQ ID NO: 38788 - protein, 13 aa, BK virus
HRLGPHLNWGGEF

SEQ ID NO: 38789 - protein, 13 aa, BK virus
RLGPHLNWGGEFL

SEQ ID NO: 38790 - protein, 13 aa, BK virus
LGPHLNWGGEFLL

SEQ ID NO: 38791 - protein, 13 aa, BK virus
GPHLNWGGEFLLC

SEQ ID NO: 38792 - protein, 13 aa, BK virus
PHLNWGGEFLLCC

SEQ ID NO: 38793 - protein, 13 aa, BK virus
HLNWGGEFLLCCN

SEQ ID NO: 38794 - protein, 13 aa, BK virus
LNWGGEFLLCCNR

SEQ ID NO: 38795 - protein, 13 aa, BK virus
NWGGEFLLCCNRE

SEQ ID NO: 38796 - protein, 13 aa, BK virus
WGGEFLLCCNREA

SEQ ID NO: 38797 - protein, 13 aa, BK virus
GGEFLLCCNREAF

SEQ ID NO: 38798 - protein, 13 aa, BK virus
GEFLLCCNREAFF

SEQ ID NO: 38799 - protein, 13 aa, BK virus
EFLLCCNREAFFS

SEQ ID NO: 38800 - protein, 13 aa, BK virus
FLLCCNREAFFSL

SEQ ID NO: 38801 - protein, 13 aa, BK virus
LLCCNREAFFSLG

SEQ ID NO: 38802 - protein, 13 aa, BK virus
LCCNREAFFSLGY

SEQ ID NO: 38803 - protein, 13 aa, BK virus
CCNREAFFSLGYH

SEQ ID NO: 38804 - protein, 13 aa, BK virus
CNREAFFSLGYHC

SEQ ID NO: 38805 - protein, 13 aa, BK virus
GFHLDPPFLGLGS

SEQ ID NO: 38806 - protein, 13 aa, BK virus
FHLDPPFLGLGSI

SEQ ID NO: 38807 - protein, 13 aa, BK virus
HLDPPFLGLGSIL

SEQ ID NO: 38808 - protein, 13 aa, BK virus
LDPPFLGLGSILP

SEQ ID NO: 38809 - protein, 13 aa, BK virus
DPPFLGLGSILPL

SEQ ID NO: 38810 - protein, 13 aa, BK virus
LLELLLLLLLVVL

SEQ ID NO: 38811 - protein, 13 aa, BK virus
LELLLLLLLVVLA

SEQ ID NO: 38812 - protein, 13 aa, BK virus
ELLLLLLLVVLAL

SEQ ID NO: 38813 - protein, 13 aa, BK virus
LLLLLLLVVLALA

SEQ ID NO: 38814 - protein, 13 aa, BK virus
LLLLLLVVLALAR

SEQ ID NO: 38815 - protein, 13 aa, BK virus
LLLLLVVLALARV

SEQ ID NO: 38816 - protein, 13 aa, BK virus
LLLLVVLALARVP

SEQ ID NO: 38817 - protein, 13 aa, BK virus
LLLVVLALARVPL

SEQ ID NO: 38818 - protein, 13 aa, BK virus
LLVVLALARVPLA

SEQ ID NO: 38819 - protein, 13 aa, BK virus
LVVLALARVPLAF

SEQ ID NO: 38820 - protein, 13 aa, BK virus
VVLALARVPLAFW

SEQ ID NO: 38821 - protein, 13 aa, BK virus
VLALARVPLAFWE

SEQ ID NO: 38822 - protein, 13 aa, BK virus
LALARVPLAFWEL

SEQ ID NO: 38823 - protein, 13 aa, BK virus
ALARVPLAFWELP

SEQ ID NO: 38824 - protein, 13 aa, BK virus
LARVPLAFWELPL

SEQ ID NO: 38825 - protein, 13 aa, BK virus
ARVPLAFWELPLD

SEQ ID NO: 38826 - protein, 13 aa, BK virus
RVPLAFWELPLDT

SEQ ID NO: 38827 - protein, 13 aa, BK virus
VPLAFWELPLDTL

SEQ ID NO: 38828 - protein, 13 aa, BK virus
PLAFWELPLDTLL

SEQ ID NO: 38829 - protein, 13 aa, BK virus
LAFWELPLDTLLF

SEQ ID NO: 38830 - protein, 13 aa, BK virus
AFWELPLDTLLFF

SEQ ID NO: 38831 - protein, 13 aa, BK virus
FWELPLDTLLFFW

SEQ ID NO: 38832 - protein, 13 aa, BK virus
WELPLDTLLFFWL

SEQ ID NO: 38833 - protein, 13 aa, BK virus
ELPLDTLLFFWLG

SEQ ID NO: 38834 - protein, 13 aa, BK virus
LPLDTLLFFWLGP

SEQ ID NO: 38835 - protein, 13 aa, BK virus
PLDTLLFFWLGPS

SEQ ID NO: 38836 - protein, 13 aa, BK virus
LDTLLFFWLGPSS

SEQ ID NO: 38837 - protein, 13 aa, BK virus
DTLLFFWLGPSSY

SEQ ID NO: 38838 - protein, 13 aa, BK virus
TLLFFWLGPSSYA

SEQ ID NO: 38839 - protein, 13 aa, BK virus
LLFFWLGPSSYAS

SEQ ID NO: 38840 - protein, 13 aa, BK virus
LFFWLGPSSYASR

SEQ ID NO: 38841 - protein, 13 aa, BK virus
FFWLGPSSYASRA

SEQ ID NO: 38842 - protein, 13 aa, BK virus
FWLGPSSYASRAG

SEQ ID NO: 38843 - protein, 13 aa, BK virus
WLGPSSYASRAGV

SEQ ID NO: 38844 - protein, 13 aa, BK virus
LGPSSYASRAGVT

SEQ ID NO: 38845 - protein, 13 aa, BK virus
GPSSYASRAGVTV

SEQ ID NO: 38846 - protein, 13 aa, BK virus
PSSYASRAGVTVP

SEQ ID NO: 38847 - protein, 13 aa, BK virus
SSYASRAGVTVPY

SEQ ID NO: 38848 - protein, 13 aa, BK virus
SYASRAGVTVPYR

SEQ ID NO: 38849 - protein, 13 aa, BK virus
YASRAGVTVPYRP

SEQ ID NO: 38850 - protein, 13 aa, BK virus
ASRAGVTVPYRPR

SEQ ID NO: 38851 - protein, 13 aa, BK virus
SRAGVTVPYRPRS

SEQ ID NO: 38852 - protein, 13 aa, BK virus
RAGVTVPYRPRSK

SEQ ID NO: 38853 - protein, 13 aa, BK virus
AGVTVPYRPRSKG

SEQ ID NO: 38854 - protein, 13 aa, BK virus
GVTVPYRPRSKGN

SEQ ID NO: 38855 - protein, 13 aa, BK virus
VTVPYRPRSKGNI

SEQ ID NO: 38856 - protein, 13 aa, BK virus
TVPYRPRSKGNIH

SEQ ID NO: 38857 - protein, 13 aa, BK virus
LAPPGAIVFSINS

SEQ ID NO: 38858 - protein, 13 aa, BK virus
APPGAIVFSINSP

SEQ ID NO: 38859 - protein, 13 aa, BK virus
PPGAIVFSINSPE

SEQ ID NO: 38860 - protein, 13 aa, BK virus
PGAIVFSINSPEC

SEQ ID NO: 38861 - protein, 13 aa, BK virus
GAIVFSINSPECT

SEQ ID NO: 38862 - protein, 13 aa, BK virus
AIVFSINSPECTL

SEQ ID NO: 38863 - protein, 13 aa, BK virus
IVFSINSPECTLC

SEQ ID NO: 38864 - protein, 13 aa, BK virus
FLKSILCVTSSIL

SEQ ID NO: 38865 - protein, 13 aa, BK virus
LKSILCVTSSILS

SEQ ID NO: 38866 - protein, 13 aa, BK virus
KSILCVTSSILSA

SEQ ID NO: 38867 - protein, 13 aa, BK virus
SILCVTSSILSAS

SEQ ID NO: 38868 - protein, 13 aa, BK virus
ILCVTSSILSASS

SEQ ID NO: 38869 - protein, 13 aa, BK virus
LCVTSSILSASSI

SEQ ID NO: 38870 - protein, 13 aa, BK virus
CVTSSILSASSIL

SEQ ID NO: 38871 - protein, 13 aa, BK virus
VWPKCTRVPSLSA

SEQ ID NO: 38872 - protein, 13 aa, BK virus
WPKCTRVPSLSAT

SEQ ID NO: 38873 - protein, 13 aa, BK virus
PKCTRVPSLSATC

SEQ ID NO: 38874 - protein, 13 aa, BK virus
KCTRVPSLSATCL

SEQ ID NO: 38875 - protein, 13 aa, BK virus
CTRVPSLSATCLT

SEQ ID NO: 38876 - protein, 13 aa, BK virus
TRVPSLSATCLTI

SEQ ID NO: 38877 - protein, 13 aa, BK virus
RVPSLSATCLTIE

SEQ ID NO: 38878 - protein, 13 aa, BK virus
VPSLSATCLTIEG

SEQ ID NO: 38879 - protein, 13 aa, BK virus
PSLSATCLTIEGL

SEQ ID NO: 38880 - protein, 13 aa, BK virus
SLSATCLTIEGLI

SEQ ID NO: 38881 - protein, 13 aa, BK virus
LSATCLTIEGLIG

SEQ ID NO: 38882 - protein, 13 aa, BK virus
SATCLTIEGLIGE

SEQ ID NO: 38883 - protein, 13 aa, BK virus
ATCLTIEGLIGER

SEQ ID NO: 38884 - protein, 13 aa, BK virus
TCLTIEGLIGERS

SEQ ID NO: 38885 - protein, 13 aa, BK virus
CLTIEGLIGERSE

SEQ ID NO: 38886 - protein, 13 aa, BK virus
KFIGAFTIVQVVS

SEQ ID NO: 38887 - protein, 13 aa, BK virus
FIGAFTIVQVVSS

SEQ ID NO: 38888 - protein, 13 aa, BK virus
IGAFTIVQVVSSK

SEQ ID NO: 38889 - protein, 13 aa, BK virus
GAFTIVQVVSSKN

SEQ ID NO: 38890 - protein, 13 aa, BK virus
AFTIVQVVSSKNL

SEQ ID NO: 38891 - protein, 13 aa, BK virus
FTIVQVVSSKNLA

SEQ ID NO: 38892 - protein, 13 aa, BK virus
TIVQVVSSKNLAK

SEQ ID NO: 38893 - protein, 13 aa, BK virus
IVQVVSSKNLAKE

SEQ ID NO: 38894 - protein, 13 aa, BK virus
VQVVSSKNLAKES

SEQ ID NO: 38895 - protein, 13 aa, BK virus
QVVSSKNLAKESL

SEQ ID NO: 38896 - protein, 13 aa, BK virus
VVSSKNLAKESLK

SEQ ID NO: 38897 - protein, 13 aa, BK virus
VSSKNLAKESLKN

SEQ ID NO: 38898 - protein, 13 aa, BK virus
SSKNLAKESLKNL

SEQ ID NO: 38899 - protein, 13 aa, BK virus
SKNLAKESLKNLS

SEQ ID NO: 38900 - protein, 13 aa, BK virus
KNLAKESLKNLSV

SEQ ID NO: 38901 - protein, 13 aa, BK virus
NLAKESLKNLSVL

SEQ ID NO: 38902 - protein, 13 aa, BK virus
LAKESLKNLSVLL

SEQ ID NO: 38903 - protein, 13 aa, BK virus
AKESLKNLSVLLC

SEQ ID NO: 38904 - protein, 13 aa, BK virus
KESLKNLSVLLCN

SEQ ID NO: 38905 - protein, 13 aa, BK virus
ESLKNLSVLLCNS

SEQ ID NO: 38906 - protein, 13 aa, BK virus
SLKNLSVLLCNSC

SEQ ID NO: 38907 - protein, 13 aa, BK virus
LKNLSVLLCNSCE

SEQ ID NO: 38908 - protein, 13 aa, BK virus
KNLSVLLCNSCEV

SEQ ID NO: 38909 - protein, 13 aa, BK virus
NLSVLLCNSCEVI

SEQ ID NO: 38910 - protein, 13 aa, BK virus
LSVLLCNSCEVIE

SEQ ID NO: 38911 - protein, 13 aa, BK virus
SVLLCNSCEVIEG

SEQ ID NO: 38912 - protein, 13 aa, BK virus
VLLCNSCEVIEGI

SEQ ID NO: 38913 - protein, 13 aa, BK virus
LLCNSCEVIEGIS

SEQ ID NO: 38914 - protein, 13 aa, BK virus
LCNSCEVIEGISS

SEQ ID NO: 38915 - protein, 13 aa, BK virus
CNSCEVIEGISSL

SEQ ID NO: 38916 - protein, 13 aa, BK virus
NSCEVIEGISSLI

SEQ ID NO: 38917 - protein, 13 aa, BK virus
SCEVIEGISSLIT

SEQ ID NO: 38918 - protein, 13 aa, BK virus
CEVIEGISSLITC

SEQ ID NO: 38919 - protein, 13 aa, BK virus
EVIEGISSLITCH

SEQ ID NO: 38920 - protein, 13 aa, BK virus
VIEGISSLITCHK

SEQ ID NO: 38921 - protein, 13 aa, BK virus
IEGISSLITCHKA

SEQ ID NO: 38922 - protein, 13 aa, BK virus
EGISSLITCHKAW

SEQ ID NO: 38923 - protein, 13 aa, BK virus
GISSLITCHKAWE

SEQ ID NO: 38924 - protein, 13 aa, BK virus
ISSLITCHKAWEI

SEQ ID NO: 38925 - protein, 13 aa, BK virus
SSLITCHKAWEIV

SEQ ID NO: 38926 - protein, 13 aa, BK virus
SLITCHKAWEIVA

SEQ ID NO: 38927 - protein, 13 aa, BK virus
LITCHKAWEIVAN

SEQ ID NO: 38928 - protein, 13 aa, BK virus
ITCHKAWEIVANK

SEQ ID NO: 38929 - protein, 13 aa, BK virus
TCHKAWEIVANKE

SEQ ID NO: 38930 - protein, 13 aa, BK virus
CHKAWEIVANKEG

SEQ ID NO: 38931 - protein, 13 aa, BK virus
HKAWEIVANKEGP

SEQ ID NO: 38932 - protein, 13 aa, BK virus
KAWEIVANKEGPQ

SEQ ID NO: 38933 - protein, 13 aa, BK virus
AWEIVANKEGPQC

SEQ ID NO: 38934 - protein, 13 aa, BK virus
WEIVANKEGPQCL

SEQ ID NO: 38935 - protein, 13 aa, BK virus
EIVANKEGPQCLG

SEQ ID NO: 38936 - protein, 13 aa, BK virus
IVANKEGPQCLGS

SEQ ID NO: 38937 - protein, 13 aa, BK virus
VANKEGPQCLGSR

SEQ ID NO: 38938 - protein, 13 aa, BK virus
ANKEGPQCLGSRY

SEQ ID NO: 38939 - protein, 13 aa, BK virus
ILLTKVFTPGNRI

SEQ ID NO: 38940 - protein, 13 aa, BK virus
LLTKVFTPGNRIS

SEQ ID NO: 38941 - protein, 13 aa, BK virus
YSSGLNNSKAMPD

SEQ ID NO: 38942 - protein, 13 aa, BK virus
SSGLNNSKAMPDC

SEQ ID NO: 38943 - protein, 13 aa, BK virus
IKAANPAIAPGAP

SEQ ID NO: 38944 - protein, 13 aa, BK virus
KAANPAIAPGAPA

SEQ ID NO: 38945 - protein, 13 aa, BK virus
AANPAIAPGAPAI

SEQ ID NO: 38946 - protein, 13 aa, BK virus
ANPAIAPGAPAIT

SEQ ID NO: 38947 - protein, 13 aa, BK virus
NPAIAPGAPAITA

SEQ ID NO: 38948 - protein, 13 aa, BK virus
PAIAPGAPAITAY

SEQ ID NO: 38949 - protein, 13 aa, BK virus
AIAPGAPAITAYV

SEQ ID NO: 38950 - protein, 13 aa, BK virus
GVRPIAAIASEVL

SEQ ID NO: 38951 - protein, 13 aa, BK virus
VRPIAAIASEVLV

SEQ ID NO: 38952 - protein, 13 aa, BK virus
RPIAAIASEVLVM

SEQ ID NO: 38953 - protein, 13 aa, BK virus
PIAAIASEVLVMP

SEQ ID NO: 38954 - protein, 13 aa, BK virus
IAAIASEVLVMPS

SEQ ID NO: 38955 - protein, 13 aa, BK virus
AAIASEVLVMPST

SEQ ID NO: 38956 - protein, 13 aa, BK virus
AIASEVLVMPSTV

SEQ ID NO: 38957 - protein, 13 aa, BK virus
IASEVLVMPSTVA

SEQ ID NO: 38958 - protein, 13 aa, BK virus
ASEVLVMPSTVAR

SEQ ID NO: 38959 - protein, 13 aa, BK virus
SEVLVMPSTVARD

SEQ ID NO: 38960 - protein, 13 aa, BK virus
EVLVMPSTVARDA

SEQ ID NO: 38961 - protein, 13 aa, BK virus
VLVMPSTVARDAI

SEQ ID NO: 38962 - protein, 13 aa, BK virus
TSIAAAASPAAIS

SEQ ID NO: 38963 - protein, 13 aa, BK virus
SIAAAASPAAISA

SEQ ID NO: 38964 - protein, 13 aa, BK virus
IAAAASPAAISAT

SEQ ID NO: 38965 - protein, 13 aa, BK virus
AAAASPAAISATE

SEQ ID NO: 38966 - protein, 13 aa, BK virus
AAASPAAISATEN

SEQ ID NO: 38967 - protein, 13 aa, BK virus
AASPAAISATENP

SEQ ID NO: 38968 - protein, 13 aa, BK virus
ASPAAISATENPV

SEQ ID NO: 38969 - protein, 13 aa, BK virus
SPAAISATENPVA

SEQ ID NO: 38970 - protein, 13 aa, BK virus
PAAISATENPVAA

SEQ ID NO: 38971 - protein, 13 aa, BK virus
AAISATENPVAAA

SEQ ID NO: 38972 - protein, 13 aa, BK virus
AISATENPVAAAA

SEQ ID NO: 38973 - protein, 13 aa, BK virus
ISATENPVAAAAS

SEQ ID NO: 38974 - protein, 13 aa, BK virus
SATENPVAAAASD

SEQ ID NO: 38975 - protein, 13 aa, BK virus
ATENPVAAAASDT

SEQ ID NO: 38976 - protein, 13 aa, BK virus
TENPVAAAASDTL

SEQ ID NO: 38977 - protein, 13 aa, BK virus
ENPVAAAASDTLA

SEQ ID NO: 38978 - protein, 13 aa, BK virus
NPVAAAASDTLAT

SEQ ID NO: 38979 - protein, 13 aa, BK virus
PVAAAASDTLATR

SEQ ID NO: 38980 - protein, 13 aa, BK virus
VAAAASDTLATRS

SEQ ID NO: 38981 - protein, 13 aa, BK virus
AAAASDTLATRSP

SEQ ID NO: 38982 - protein, 13 aa, BK virus
AAASDTLATRSPK

SEQ ID NO: 38983 - protein, 13 aa, BK virus
AASDTLATRSPKS

SEQ ID NO: 38984 - protein, 13 aa, BK virus
ASDTLATRSPKSA

SEQ ID NO: 38985 - protein, 13 aa, BK virus
SDTLATRSPKSAR

SEQ ID NO: 38986 - protein, 13 aa, BK virus
DTLATRSPKSARA

SEQ ID NO: 38987 - protein, 13 aa, BK virus
TLATRSPKSARAA

SEQ ID NO: 38988 - protein, 13 aa, BK virus
LATRSPKSARAAP

SEQ ID NO: 38989 - protein, 13 aa, BK virus
ATRSPKSARAAPM

SEQ ID NO: 38990 - protein, 13 aa, BK virus
TRSPKSARAAPMN

SEQ ID NO: 38991 - protein, 13 aa, BK virus
RSPKSARAAPMNL

SEQ ID NO: 38992 - protein, 13 aa, BK virus
SPKSARAAPMNLE

SEQ ID NO: 38993 - protein, 13 aa, BK virus
PKSARAAPMNLEI

SEQ ID NO: 38994 - protein, 13 aa, BK virus
KSARAAPMNLEIQ

SEQ ID NO: 38995 - protein, 13 aa, BK virus
SARAAPMNLEIQK

SEQ ID NO: 38996 - protein, 13 aa, BK virus
ARAAPMNLEIQKK

SEQ ID NO: 38997 - protein, 13 aa, BK virus
RAAPMNLEIQKKR

SEQ ID NO: 38998 - protein, 13 aa, BK virus
AAPMNLEIQKKRD

SEQ ID NO: 38999 - protein, 13 aa, BK virus
APMNLEIQKKRDY

SEQ ID NO: 39000 - protein, 13 aa, BK virus
PMNLEIQKKRDYL

SEQ ID NO: 39001 - protein, 13 aa, BK virus
MNLEIQKKRDYLP

SEQ ID NO: 39002 - protein, 13 aa, BK virus
NLEIQKKRDYLPR

SEQ ID NO: 39003 - protein, 13 aa, BK virus
LEIQKKRDYLPRS

SEQ ID NO: 39004 - protein, 13 aa, BK virus
EIQKKRDYLPRSL

SEQ ID NO: 39005 - protein, 13 aa, BK virus
IQKKRDYLPRSLL

SEQ ID NO: 39006 - protein, 13 aa, BK virus
QKKRDYLPRSLLQ

SEQ ID NO: 39007 - protein, 13 aa, BK virus
KKRDYLPRSLLQS

SEQ ID NO: 39008 - protein, 13 aa, BK virus
KRDYLPRSLLQSL

SEQ ID NO: 39009 - protein, 13 aa, BK virus
RDYLPRSLLQSLL

SEQ ID NO: 39010 - protein, 13 aa, BK virus
DYLPRSLLQSLLQ

SEQ ID NO: 39011 - protein, 13 aa, BK virus
YLPRSLLQSLLQQ

SEQ ID NO: 39012 - protein, 13 aa, BK virus
LPRSLLQSLLQQV

SEQ ID NO: 39013 - protein, 13 aa, BK virus
PRSLLQSLLQQVK

SEQ ID NO: 39014 - protein, 13 aa, BK virus
RSLLQSLLQQVKQ

SEQ ID NO: 39015 - protein, 13 aa, BK virus
SLLQSLLQQVKQW

SEQ ID NO: 39016 - protein, 13 aa, BK virus
LLQSLLQQVKQWY

SEQ ID NO: 39017 - protein, 13 aa, BK virus
LQSLLQQVKQWYF

SEQ ID NO: 39018 - protein, 13 aa, BK virus
QSLLQQVKQWYFC

SEQ ID NO: 39019 - protein, 13 aa, BK virus
SLLQQVKQWYFCF

SEQ ID NO: 39020 - protein, 13 aa, BK virus
LLQQVKQWYFCFS

SEQ ID NO: 39021 - protein, 13 aa, BK virus
LQQVKQWYFCFSR

SEQ ID NO: 39022 - protein, 13 aa, BK virus
QQVKQWYFCFSRL

SEQ ID NO: 39023 - protein, 13 aa, BK virus
QVKQWYFCFSRLH

SEQ ID NO: 39024 - protein, 13 aa, BK virus
VKQWYFCFSRLHC

SEQ ID NO: 39025 - protein, 13 aa, BK virus
KQWYFCFSRLHCL

SEQ ID NO: 39026 - protein, 13 aa, BK virus
QWYFCFSRLHCLH

SEQ ID NO: 39027 - protein, 13 aa, BK virus
WYFCFSRLHCLHL

SEQ ID NO: 39028 - protein, 13 aa, BK virus
YFCFSRLHCLHLY

SEQ ID NO: 39029 - protein, 13 aa, BK virus
FCFSRLHCLHLYK

SEQ ID NO: 39030 - protein, 13 aa, BK virus
CFSRLHCLHLYKI

SEQ ID NO: 39031 - protein, 13 aa, BK virus
FSRLHCLHLYKIP

SEQ ID NO: 39032 - protein, 13 aa, BK virus
SRLHCLHLYKIPA

SEQ ID NO: 39033 - protein, 13 aa, BK virus
RLHCLHLYKIPAK

SEQ ID NO: 39034 - protein, 13 aa, BK virus
LHCLHLYKIPAKA

SEQ ID NO: 39035 - protein, 13 aa, BK virus
HCLHLYKIPAKAL

SEQ ID NO: 39036 - protein, 13 aa, BK virus
CLHLYKIPAKALK

SEQ ID NO: 39037 - protein, 13 aa, BK virus
KSSELFFLFQSRF

SEQ ID NO: 39038 - protein, 13 aa, BK virus
SSELFFLFQSRFY

SEQ ID NO: 39039 - protein, 13 aa, BK virus
SELFFLFQSRFYQ

SEQ ID NO: 39040 - protein, 13 aa, BK virus
ELFFLFQSRFYQL

SEQ ID NO: 39041 - protein, 13 aa, BK virus
LFFLFQSRFYQLS

SEQ ID NO: 39042 - protein, 13 aa, BK virus
FFLFQSRFYQLSL

SEQ ID NO: 39043 - protein, 13 aa, BK virus
FLFQSRFYQLSLK

SEQ ID NO: 39044 - protein, 13 aa, BK virus
LFQSRFYQLSLKL

SEQ ID NO: 39045 - protein, 13 aa, BK virus
FQSRFYQLSLKLV

SEQ ID NO: 39046 - protein, 13 aa, BK virus
QSRFYQLSLKLVV

SEQ ID NO: 39047 - protein, 13 aa, BK virus
SRFYQLSLKLVVT

SEQ ID NO: 39048 - protein, 13 aa, BK virus
RFYQLSLKLVVTA

SEQ ID NO: 39049 - protein, 13 aa, BK virus
FYQLSLKLVVTAG

SEQ ID NO: 39050 - protein, 13 aa, BK virus
YQLSLKLVVTAGA

SEQ ID NO: 39051 - protein, 13 aa, BK virus
QLSLKLVVTAGAE

SEQ ID NO: 39052 - protein, 13 aa, BK virus
LSLKLVVTAGAEP

SEQ ID NO: 39053 - protein, 13 aa, BK virus
SLKLVVTAGAEPW

SEQ ID NO: 39054 - protein, 13 aa, BK virus
LKLVVTAGAEPWP

SEQ ID NO: 39055 - protein, 13 aa, BK virus
KLVVTAGAEPWPL

SEQ ID NO: 39056 - protein, 13 aa, BK virus
LVVTAGAEPWPLS

SEQ ID NO: 39057 - protein, 13 aa, BK virus
VVTAGAEPWPLSS

SEQ ID NO: 39058 - protein, 13 aa, BK virus
VTAGAEPWPLSSL

SEQ ID NO: 39059 - protein, 13 aa, BK virus
TAGAEPWPLSSLT

SEQ ID NO: 39060 - protein, 13 aa, BK virus
AGAEPWPLSSLTG

SEQ ID NO: 39061 - protein, 13 aa, BK virus
GAEPWPLSSLTGD

SEQ ID NO: 39062 - protein, 13 aa, BK virus
AEPWPLSSLTGDK

SEQ ID NO: 39063 - protein, 13 aa, BK virus
EPWPLSSLTGDKA

SEQ ID NO: 39064 - protein, 13 aa, BK virus
PWPLSSLTGDKAK

SEQ ID NO: 39065 - protein, 13 aa, BK virus
WPLSSLTGDKAKI

SEQ ID NO: 39066 - protein, 13 aa, BK virus
PLSSLTGDKAKIP

SEQ ID NO: 39067 - protein, 13 aa, BK virus
LSSLTGDKAKIPR

SEQ ID NO: 39068 - protein, 13 aa, BK virus
SSLTGDKAKIPRL

SEQ ID NO: 39069 - protein, 13 aa, BK virus
SLTGDKAKIPRLA

SEQ ID NO: 39070 - protein, 13 aa, BK virus
LTGDKAKIPRLAK

SEQ ID NO: 39071 - protein, 13 aa, BK virus
TGDKAKIPRLAKH

SEQ ID NO: 39072 - protein, 13 aa, BK virus
GDKAKIPRLAKHV

SEQ ID NO: 39073 - protein, 13 aa, BK virus
DKAKIPRLAKHVC

SEQ ID NO: 39074 - protein, 13 aa, BK virus
KAKIPRLAKHVCH

SEQ ID NO: 39075 - protein, 13 aa, BK virus
AKIPRLAKHVCHA

SEQ ID NO: 39076 - protein, 13 aa, BK virus
KIPRLAKHVCHAL

SEQ ID NO: 39077 - protein, 13 aa, BK virus
IPRLAKHVCHALS

SEQ ID NO: 39078 - protein, 13 aa, BK virus
PRLAKHVCHALSF

SEQ ID NO: 39079 - protein, 13 aa, BK virus
RLAKHVCHALSFL

SEQ ID NO: 39080 - protein, 13 aa, BK virus
LAKHVCHALSFLR

SEQ ID NO: 39081 - protein, 13 aa, BK virus
AKHVCHALSFLRS

SEQ ID NO: 39082 - protein, 13 aa, BK virus
KHVCHALSFLRSW

SEQ ID NO: 39083 - protein, 13 aa, BK virus
HVCHALSFLRSWF

SEQ ID NO: 39084 - protein, 13 aa, BK virus
VCHALSFLRSWFG

SEQ ID NO: 39085 - protein, 13 aa, BK virus
CHALSFLRSWFGC

SEQ ID NO: 39086 - protein, 13 aa, BK virus
HALSFLRSWFGCI

SEQ ID NO: 39087 - protein, 13 aa, BK virus
ALSFLRSWFGCIP

SEQ ID NO: 39088 - protein, 13 aa, BK virus
LSFLRSWFGCIPW

SEQ ID NO: 39089 - protein, 13 aa, BK virus
SFLRSWFGCIPWV

SEQ ID NO: 39090 - protein, 13 aa, BK virus
FLRSWFGCIPWVS

SEQ ID NO: 39091 - protein, 13 aa, BK virus
LRSWFGCIPWVSS

SEQ ID NO: 39092 - protein, 13 aa, BK virus
RSWFGCIPWVSSS

SEQ ID NO: 39093 - protein, 13 aa, BK virus
SWFGCIPWVSSSS

SEQ ID NO: 39094 - protein, 13 aa, BK virus
WFGCIPWVSSSSL

SEQ ID NO: 39095 - protein, 13 aa, BK virus
GHGLAAFPCESCT

SEQ ID NO: 39096 - protein, 13 aa, BK virus
HGLAAFPCESCTF

SEQ ID NO: 39097 - protein, 13 aa, BK virus
GLAAFPCESCTFL

SEQ ID NO: 39098 - protein, 13 aa, BK virus
LAAFPCESCTFLP

SEQ ID NO: 39099 - protein, 13 aa, BK virus
AAFPCESCTFLPE

SEQ ID NO: 39100 - protein, 13 aa, BK virus
AFPCESCTFLPEV

SEQ ID NO: 39101 - protein, 13 aa, BK virus
FPCESCTFLPEVM

SEQ ID NO: 39102 - protein, 13 aa, BK virus
PCESCTFLPEVMV

SEQ ID NO: 39103 - protein, 13 aa, BK virus
CESCTFLPEVMVW

SEQ ID NO: 39104 - protein, 13 aa, BK virus
ESCTFLPEVMVWL

SEQ ID NO: 39105 - protein, 13 aa, BK virus
SCTFLPEVMVWLH

SEQ ID NO: 39106 - protein, 13 aa, BK virus
CTFLPEVMVWLHS

SEQ ID NO: 39107 - protein, 13 aa, BK virus
TFLPEVMVWLHSM

SEQ ID NO: 39108 - protein, 13 aa, BK virus
FLPEVMVWLHSMG

SEQ ID NO: 39109 - protein, 13 aa, BK virus
LPEVMVWLHSMGK

SEQ ID NO: 39110 - protein, 13 aa, BK virus
PEVMVWLHSMGKQ

SEQ ID NO: 39111 - protein, 13 aa, BK virus
EVMVWLHSMGKQL

SEQ ID NO: 39112 - protein, 13 aa, BK virus
VMVWLHSMGKQLL

SEQ ID NO: 39113 - protein, 13 aa, BK virus
MVWLHSMGKQLLP

SEQ ID NO: 39114 - protein, 13 aa, BK virus
VWLHSMGKQLLPV

SEQ ID NO: 39115 - protein, 13 aa, BK virus
WLHSMGKQLLPVA

SEQ ID NO: 39116 - protein, 13 aa, BK virus
LHSMGKQLLPVAF

SEQ ID NO: 39117 - protein, 13 aa, BK virus
HSMGKQLLPVAFF

SEQ ID NO: 39118 - protein, 13 aa, BK virus
SMGKQLLPVAFFF

SEQ ID NO: 39119 - protein, 13 aa, BK virus
MGKQLLPVAFFFI

SEQ ID NO: 39120 - protein, 13 aa, BK virus
GKQLLPVAFFFII

SEQ ID NO: 39121 - protein, 13 aa, BK virus
KQLLPVAFFFIIY

SEQ ID NO: 39122 - protein, 13 aa, BK virus
QLLPVAFFFIIYK

SEQ ID NO: 39123 - protein, 13 aa, BK virus
LLPVAFFFIIYKR

SEQ ID NO: 39124 - protein, 13 aa, BK virus
LPVAFFFIIYKRP

SEQ ID NO: 39125 - protein, 13 aa, BK virus
PVAFFFIIYKRPR

SEQ ID NO: 39126 - protein, 13 aa, BK virus
VAFFFIIYKRPRP

SEQ ID NO: 39127 - protein, 13 aa, BK virus
AFFFIIYKRPRPP

SEQ ID NO: 39128 - protein, 13 aa, BK virus
FFFIIYKRPRPPL

SEQ ID NO: 39129 - protein, 13 aa, BK virus
FFIIYKRPRPPLP

SEQ ID NO: 39130 - protein, 13 aa, BK virus
FIIYKRPRPPLPP

SEQ ID NO: 39131 - protein, 13 aa, BK virus
IIYKRPRPPLPPP

SEQ ID NO: 39132 - protein, 13 aa, BK virus
IYKRPRPPLPPPF

SEQ ID NO: 39133 - protein, 13 aa, BK virus
YKRPRPPLPPPFL

SEQ ID NO: 39134 - protein, 13 aa, BK virus
KRPRPPLPPPFLS

SEQ ID NO: 39135 - protein, 13 aa, BK virus
RPRPPLPPPFLSS

SEQ ID NO: 39136 - protein, 13 aa, BK virus
PRPPLPPPFLSSS

SEQ ID NO: 39137 - protein, 13 aa, BK virus
RPPLPPPFLSSSK

SEQ ID NO: 39138 - protein, 13 aa, BK virus
PPLPPPFLSSSKG

SEQ ID NO: 39139 - protein, 13 aa, BK virus
PLPPPFLSSSKGV

SEQ ID NO: 39140 - protein, 13 aa, BK virus
LPPPFLSSSKGVE

SEQ ID NO: 39141 - protein, 13 aa, BK virus
PPPFLSSSKGVEA

SEQ ID NO: 39142 - protein, 13 aa, BK virus
PPFLSSSKGVEAF

SEQ ID NO: 39143 - protein, 13 aa, BK virus
PFLSSSKGVEAFS

SEQ ID NO: 39144 - protein, 13 aa, BK virus
FLSSSKGVEAFSE

SEQ ID NO: 39145 - protein, 13 aa, BK virus
LSSSKGVEAFSEA

SEQ ID NO: 39146 - protein, 13 aa, BK virus
QNYLGKSLFFCNF

SEQ ID NO: 39147 - protein, 13 aa, BK virus
NYLGKSLFFCNFC

SEQ ID NO: 39148 - protein, 13 aa, BK virus
YLGKSLFFCNFCK

SEQ ID NO: 39149 - protein, 14 aa, BK virus
WIKFLTGKNPWSSW

SEQ ID NO: 39150 - protein, 14 aa, BK virus
IKFLTGKNPWSSWT

SEQ ID NO: 39151 - protein, 14 aa, BK virus
KFLTGKNPWSSWTF

SEQ ID NO: 39152 - protein, 14 aa, BK virus
GSVRNFTLTKGATR

SEQ ID NO: 39153 - protein, 14 aa, BK virus
SVRNFTLTKGATRI

SEQ ID NO: 39154 - protein, 14 aa, BK virus
VRNFTLTKGATRIK

SEQ ID NO: 39155 - protein, 14 aa, BK virus
LISLILEPGVAQRF

SEQ ID NO: 39156 - protein, 14 aa, BK virus
ISLILEPGVAQRFV

SEQ ID NO: 39157 - protein, 14 aa, BK virus
SLILEPGVAQRFVL

SEQ ID NO: 39158 - protein, 14 aa, BK virus
LILEPGVAQRFVLI

SEQ ID NO: 39159 - protein, 14 aa, BK virus
ILEPGVAQRFVLIF

SEQ ID NO: 39160 - protein, 14 aa, BK virus
LEPGVAQRFVLIFL

SEQ ID NO: 39161 - protein, 14 aa, BK virus
EPGVAQRFVLIFLF

SEQ ID NO: 39162 - protein, 14 aa, BK virus
PGVAQRFVLIFLFA

SEQ ID NO: 39163 - protein, 14 aa, BK virus
GVAQRFVLIFLFAQ

SEQ ID NO: 39164 - protein, 14 aa, BK virus
VAQRFVLIFLFAQI

SEQ ID NO: 39165 - protein, 14 aa, BK virus
AQRFVLIFLFAQIP

SEQ ID NO: 39166 - protein, 14 aa, BK virus
QRFVLIFLFAQIPC

SEQ ID NO: 39167 - protein, 14 aa, BK virus
RFVLIFLFAQIPCT

SEQ ID NO: 39168 - protein, 14 aa, BK virus
FVLIFLFAQIPCTA

SEQ ID NO: 39169 - protein, 14 aa, BK virus
VLIFLFAQIPCTAR

SEQ ID NO: 39170 - protein, 14 aa, BK virus
LIFLFAQIPCTARN

SEQ ID NO: 39171 - protein, 14 aa, BK virus
IFLFAQIPCTARNG

SEQ ID NO: 39172 - protein, 14 aa, BK virus
FLFAQIPCTARNGL

SEQ ID NO: 39173 - protein, 14 aa, BK virus
LFAQIPCTARNGLF

SEQ ID NO: 39174 - protein, 14 aa, BK virus
FAQIPCTARNGLFV

SEQ ID NO: 39175 - protein, 14 aa, BK virus
AQIPCTARNGLFVP

SEQ ID NO: 39176 - protein, 14 aa, BK virus
QIPCTARNGLFVPK

SEQ ID NO: 39177 - protein, 14 aa, BK virus
IPCTARNGLFVPKS

SEQ ID NO: 39178 - protein, 14 aa, BK virus
PCTARNGLFVPKSL

SEQ ID NO: 39179 - protein, 14 aa, BK virus
CTARNGLFVPKSLL

SEQ ID NO: 39180 - protein, 14 aa, BK virus
TARNGLFVPKSLLC

SEQ ID NO: 39181 - protein, 14 aa, BK virus
ARNGLFVPKSLLCT

SEQ ID NO: 39182 - protein, 14 aa, BK virus
RNGLFVPKSLLCTA

SEQ ID NO: 39183 - protein, 14 aa, BK virus
NGLFVPKSLLCTAL

SEQ ID NO: 39184 - protein, 14 aa, BK virus
GLFVPKSLLCTALA

SEQ ID NO: 39185 - protein, 14 aa, BK virus
LFVPKSLLCTALAC

SEQ ID NO: 39186 - protein, 14 aa, BK virus
FVPKSLLCTALACY

SEQ ID NO: 39187 - protein, 14 aa, BK virus
VPKSLLCTALACYV

SEQ ID NO: 39188 - protein, 14 aa, BK virus
PKSLLCTALACYVS

SEQ ID NO: 39189 - protein, 14 aa, BK virus
KSLLCTALACYVSL

SEQ ID NO: 39190 - protein, 14 aa, BK virus
SLLCTALACYVSLD

SEQ ID NO: 39191 - protein, 14 aa, BK virus
VIIFFIGANLWNRR

SEQ ID NO: 39192 - protein, 14 aa, BK virus
IIFFIGANLWNRRV

SEQ ID NO: 39193 - protein, 14 aa, BK virus
IFFIGANLWNRRVG

SEQ ID NO: 39194 - protein, 14 aa, BK virus
FFIGANLWNRRVGV

SEQ ID NO: 39195 - protein, 14 aa, BK virus
FIGANLWNRRVGVL

SEQ ID NO: 39196 - protein, 14 aa, BK virus
IGANLWNRRVGVLV

SEQ ID NO: 39197 - protein, 14 aa, BK virus
GANLWNRRVGVLVE

SEQ ID NO: 39198 - protein, 14 aa, BK virus
ANLWNRRVGVLVEF

SEQ ID NO: 39199 - protein, 14 aa, BK virus
NLWNRRVGVLVEFL

SEQ ID NO: 39200 - protein, 14 aa, BK virus
RSNSRFSTLNTTQK

SEQ ID NO: 39201 - protein, 14 aa, BK virus
SNSRFSTLNTTQKK

SEQ ID NO: 39202 - protein, 14 aa, BK virus
NSRFSTLNTTQKKK

SEQ ID NO: 39203 - protein, 14 aa, BK virus
SRFSTLNTTQKKKK

SEQ ID NO: 39204 - protein, 14 aa, BK virus
RFSTLNTTQKKKKG

SEQ ID NO: 39205 - protein, 14 aa, BK virus
FSTLNTTQKKKKGR

SEQ ID NO: 39206 - protein, 14 aa, BK virus
STLNTTQKKKKGRR

SEQ ID NO: 39207 - protein, 14 aa, BK virus
TLNTTQKKKKGRRP

SEQ ID NO: 39208 - protein, 14 aa, BK virus
RSIPYYRRKHSRGL

SEQ ID NO: 39209 - protein, 14 aa, BK virus
SIPYYRRKHSRGLK

SEQ ID NO: 39210 - protein, 14 aa, BK virus
IPYYRRKHSRGLKG

SEQ ID NO: 39211 - protein, 14 aa, BK virus
PYYRRKHSRGLKGA

SEQ ID NO: 39212 - protein, 14 aa, BK virus
GCVFIIRYVFRISI

SEQ ID NO: 39213 - protein, 14 aa, BK virus
CVFIIRYVFRISIQ

SEQ ID NO: 39214 - protein, 14 aa, BK virus
VFIIRYVFRISIQC

SEQ ID NO: 39215 - protein, 14 aa, BK virus
FIIRYVFRISIQCR

SEQ ID NO: 39216 - protein, 14 aa, BK virus
IIRYVFRISIQCRG

SEQ ID NO: 39217 - protein, 14 aa, BK virus
IRYVFRISIQCRGV

SEQ ID NO: 39218 - protein, 14 aa, BK virus
KSKKYLSASSRYSF

SEQ ID NO: 39219 - protein, 14 aa, BK virus
SKKYLSASSRYSFS

SEQ ID NO: 39220 - protein, 14 aa, BK virus
KKSRYPSYDQGRNA

SEQ ID NO: 39221 - protein, 14 aa, BK virus
KSRYPSYDQGRNAN

SEQ ID NO: 39222 - protein, 14 aa, BK virus
SRYPSYDQGRNANR

SEQ ID NO: 39223 - protein, 14 aa, BK virus
RYPSYDQGRNANRK

SEQ ID NO: 39224 - protein, 14 aa, BK virus
YPSYDQGRNANRKI

SEQ ID NO: 39225 - protein, 14 aa, BK virus
PSYDQGRNANRKIQ

SEQ ID NO: 39226 - protein, 14 aa, BK virus
SYDQGRNANRKIQS

SEQ ID NO: 39227 - protein, 14 aa, BK virus
YDQGRNANRKIQSY

SEQ ID NO: 39228 - protein, 14 aa, BK virus
DQGRNANRKIQSYI

SEQ ID NO: 39229 - protein, 14 aa, BK virus
QGRNANRKIQSYIR

SEQ ID NO: 39230 - protein, 14 aa, BK virus
NGFNIWSSWKCCTR

SEQ ID NO: 39231 - protein, 14 aa, BK virus
GFNIWSSWKCCTRT

SEQ ID NO: 39232 - protein, 14 aa, BK virus
FNIWSSWKCCTRTI

SEQ ID NO: 39233 - protein, 14 aa, BK virus
NIWSSWKCCTRTIY

SEQ ID NO: 39234 - protein, 14 aa, BK virus
IWSSWKCCTRTIYG

SEQ ID NO: 39235 - protein, 14 aa, BK virus
WSSWKCCTRTIYGR

SEQ ID NO: 39236 - protein, 14 aa, BK virus
SSWKCCTRTIYGRC

SEQ ID NO: 39237 - protein, 14 aa, BK virus
SWKCCTRTIYGRCC

SEQ ID NO: 39238 - protein, 14 aa, BK virus
WKCCTRTIYGRCCL

SEQ ID NO: 39239 - protein, 14 aa, BK virus
KCCTRTIYGRCCLA

SEQ ID NO: 39240 - protein, 14 aa, BK virus
CCTRTIYGRCCLAA

SEQ ID NO: 39241 - protein, 14 aa, BK virus
CTRTIYGRCCLAAL

SEQ ID NO: 39242 - protein, 14 aa, BK virus
TRTIYGRCCLAALF

SEQ ID NO: 39243 - protein, 14 aa, BK virus
RTIYGRCCLAALFA

SEQ ID NO: 39244 - protein, 14 aa, BK virus
TIYGRCCLAALFAT

SEQ ID NO: 39245 - protein, 14 aa, BK virus
WKNNTSCRVIRFVW

SEQ ID NO: 39246 - protein, 14 aa, BK virus
KNNTSCRVIRFVWW

SEQ ID NO: 39247 - protein, 14 aa, BK virus
IKGFAFRTWNKQFR

SEQ ID NO: 39248 - protein, 14 aa, BK virus
KGFAFRTWNKQFRQ

SEQ ID NO: 39249 - protein, 14 aa, BK virus
GFAFRTWNKQFRQF

SEQ ID NO: 39250 - protein, 14 aa, BK virus
FAFRTWNKQFRQFE

SEQ ID NO: 39251 - protein, 14 aa, BK virus
AFRTWNKQFRQFER

SEQ ID NO: 39252 - protein, 14 aa, BK virus
FRTWNKQFRQFERL

SEQ ID NO: 39253 - protein, 14 aa, BK virus
RTWNKQFRQFERLF

SEQ ID NO: 39254 - protein, 14 aa, BK virus
TWNKQFRQFERLFR

SEQ ID NO: 39255 - protein, 14 aa, BK virus
WNKQFRQFERLFRW

SEQ ID NO: 39256 - protein, 14 aa, BK virus
NKQFRQFERLFRWK

SEQ ID NO: 39257 - protein, 14 aa, BK virus
KQFRQFERLFRWKC

SEQ ID NO: 39258 - protein, 14 aa, BK virus
GKFRKETFKQKNPN

SEQ ID NO: 39259 - protein, 14 aa, BK virus
KFRKETFKQKNPNI

SEQ ID NO: 39260 - protein, 14 aa, BK virus
FRKETFKQKNPNIS

SEQ ID NO: 39261 - protein, 14 aa, BK virus
RKETFKQKNPNIST

SEQ ID NO: 39262 - protein, 14 aa, BK virus
KETFKQKNPNISTR

SEQ ID NO: 39263 - protein, 14 aa, BK virus
ETFKQKNPNISTRL

SEQ ID NO: 39264 - protein, 14 aa, BK virus
TFKQKNPNISTRLG

SEQ ID NO: 39265 - protein, 14 aa, BK virus
FKQKNPNISTRLGY

SEQ ID NO: 39266 - protein, 14 aa, BK virus
KQKNPNISTRLGYN

SEQ ID NO: 39267 - protein, 14 aa, BK virus
QKNPNISTRLGYNE

SEQ ID NO: 39268 - protein, 14 aa, BK virus
AQNIFKKILTKLRV

SEQ ID NO: 39269 - protein, 14 aa, BK virus
QNIFKKILTKLRVL

SEQ ID NO: 39270 - protein, 14 aa, BK virus
NIFKKILTKLRVLT

SEQ ID NO: 39271 - protein, 14 aa, BK virus
KKNFTKWNDLVATA

SEQ ID NO: 39272 - protein, 14 aa, BK virus
KNFTKWNDLVATAN

SEQ ID NO: 39273 - protein, 14 aa, BK virus
NFTKWNDLVATANL

SEQ ID NO: 39274 - protein, 14 aa, BK virus
FTKWNDLVATANLV

SEQ ID NO: 39275 - protein, 14 aa, BK virus
IPITMLFPSLRYFS

SEQ ID NO: 39276 - protein, 14 aa, BK virus
PITMLFPSLRYFSP

SEQ ID NO: 39277 - protein, 14 aa, BK virus
ITMLFPSLRYFSPC

SEQ ID NO: 39278 - protein, 14 aa, BK virus
KWLIQKQHLLNVYV

SEQ ID NO: 39279 - protein, 14 aa, BK virus
WLIQKQHLLNVYVQ

SEQ ID NO: 39280 - protein, 14 aa, BK virus
KHLFKAFWFAIVPV

SEQ ID NO: 39281 - protein, 14 aa, BK virus
HLFKAFWFAIVPVC

SEQ ID NO: 39282 - protein, 14 aa, BK virus
LFKAFWFAIVPVCQ

SEQ ID NO: 39283 - protein, 14 aa, BK virus
FKAFWFAIVPVCQY

SEQ ID NO: 39284 - protein, 14 aa, BK virus
KAFWFAIVPVCQYI

SEQ ID NO: 39285 - protein, 14 aa, BK virus
AFWFAIVPVCQYIL

SEQ ID NO: 39286 - protein, 14 aa, BK virus
FWFAIVPVCQYILS

SEQ ID NO: 39287 - protein, 14 aa, BK virus
WFAIVPVCQYILSY

SEQ ID NO: 39288 - protein, 14 aa, BK virus
FAIVPVCQYILSYL

SEQ ID NO: 39289 - protein, 14 aa, BK virus
AIVPVCQYILSYLG

SEQ ID NO: 39290 - protein, 14 aa, BK virus
IVPVCQYILSYLGP

SEQ ID NO: 39291 - protein, 14 aa, BK virus
VPVCQYILSYLGPL

SEQ ID NO: 39292 - protein, 14 aa, BK virus
PVCQYILSYLGPLE

SEQ ID NO: 39293 - protein, 14 aa, BK virus
VCQYILSYLGPLEV

SEQ ID NO: 39294 - protein, 14 aa, BK virus
CQYILSYLGPLEVF

SEQ ID NO: 39295 - protein, 14 aa, BK virus
QYILSYLGPLEVFL

SEQ ID NO: 39296 - protein, 14 aa, BK virus
YILSYLGPLEVFLC

SEQ ID NO: 39297 - protein, 14 aa, BK virus
ILSYLGPLEVFLCH

SEQ ID NO: 39298 - protein, 14 aa, BK virus
LSYLGPLEVFLCHQ

SEQ ID NO: 39299 - protein, 14 aa, BK virus
SYLGPLEVFLCHQT

SEQ ID NO: 39300 - protein, 14 aa, BK virus
YLGPLEVFLCHQTP

SEQ ID NO: 39301 - protein, 14 aa, BK virus
GHLAKRKLGKDSLQ

SEQ ID NO: 39302 - protein, 14 aa, BK virus
HLAKRKLGKDSLQI

SEQ ID NO: 39303 - protein, 14 aa, BK virus
LAKRKLGKDSLQIF

SEQ ID NO: 39304 - protein, 14 aa, BK virus
AKRKLGKDSLQIFF

SEQ ID NO: 39305 - protein, 14 aa, BK virus
KRKLGKDSLQIFFS

SEQ ID NO: 39306 - protein, 14 aa, BK virus
RKLGKDSLQIFFSG

SEQ ID NO: 39307 - protein, 14 aa, BK virus
KLGKDSLQIFFSGG

SEQ ID NO: 39308 - protein, 14 aa, BK virus
LGKDSLQIFFSGGS

SEQ ID NO: 39309 - protein, 14 aa, BK virus
NILQGLSTVVFQSC

SEQ ID NO: 39310 - protein, 14 aa, BK virus
TGHKYQQLKHTGYQ

SEQ ID NO: 39311 - protein, 14 aa, BK virus
GHKYQQLKHTGYQL

SEQ ID NO: 39312 - protein, 14 aa, BK virus
HKYQQLKHTGYQLY

SEQ ID NO: 39313 - protein, 14 aa, BK virus
KYQQLKHTGYQLYK

SEQ ID NO: 39314 - protein, 14 aa, BK virus
YQQLKHTGYQLYKE

SEQ ID NO: 39315 - protein, 14 aa, BK virus
QQLKHTGYQLYKEA

SEQ ID NO: 39316 - protein, 14 aa, BK virus
QLKHTGYQLYKEAP

SEQ ID NO: 39317 - protein, 14 aa, BK virus
LKHTGYQLYKEAPH

SEQ ID NO: 39318 - protein, 14 aa, BK virus
KHTGYQLYKEAPHP

SEQ ID NO: 39319 - protein, 14 aa, BK virus
HTGYQLYKEAPHPV

SEQ ID NO: 39320 - protein, 14 aa, BK virus
TGYQLYKEAPHPVH

SEQ ID NO: 39321 - protein, 14 aa, BK virus
GYQLYKEAPHPVHL

SEQ ID NO: 39322 - protein, 14 aa, BK virus
YQLYKEAPHPVHLA

SEQ ID NO: 39323 - protein, 14 aa, BK virus
QLYKEAPHPVHLAT

SEQ ID NO: 39324 - protein, 14 aa, BK virus
LYKEAPHPVHLATL

SEQ ID NO: 39325 - protein, 14 aa, BK virus
YKEAPHPVHLATLW

SEQ ID NO: 39326 - protein, 14 aa, BK virus
LCWSHEVLGEHFPL

SEQ ID NO: 39327 - protein, 14 aa, BK virus
CWSHEVLGEHFPLL

SEQ ID NO: 39328 - protein, 14 aa, BK virus
HFHFYWDQVPSTQL

SEQ ID NO: 39329 - protein, 14 aa, BK virus
FHFYWDQVPSTQLD

SEQ ID NO: 39330 - protein, 14 aa, BK virus
HFYWDQVPSTQLDK

SEQ ID NO: 39331 - protein, 14 aa, BK virus
FYWDQVPSTQLDKH

SEQ ID NO: 39332 - protein, 14 aa, BK virus
YWDQVPSTQLDKHC

SEQ ID NO: 39333 - protein, 14 aa, BK virus
WDQVPSTQLDKHCF

SEQ ID NO: 39334 - protein, 14 aa, BK virus
DQVPSTQLDKHCFC

SEQ ID NO: 39335 - protein, 14 aa, BK virus
QVPSTQLDKHCFCP

SEQ ID NO: 39336 - protein, 14 aa, BK virus
VPSTQLDKHCFCPN

SEQ ID NO: 39337 - protein, 14 aa, BK virus
PSTQLDKHCFCPNR

SEQ ID NO: 39338 - protein, 14 aa, BK virus
STQLDKHCFCPNRP

SEQ ID NO: 39339 - protein, 14 aa, BK virus
TQLDKHCFCPNRPY

SEQ ID NO: 39340 - protein, 14 aa, BK virus
QLDKHCFCPNRPYG

SEQ ID NO: 39341 - protein, 14 aa, BK virus
LDKHCFCPNRPYGQ

SEQ ID NO: 39342 - protein, 14 aa, BK virus
DKHCFCPNRPYGQY

SEQ ID NO: 39343 - protein, 14 aa, BK virus
KHCFCPNRPYGQYS

SEQ ID NO: 39344 - protein, 14 aa, BK virus
HCFCPNRPYGQYSL

SEQ ID NO: 39345 - protein, 14 aa, BK virus
CFCPNRPYGQYSLP

SEQ ID NO: 39346 - protein, 14 aa, BK virus
FCPNRPYGQYSLPG

SEQ ID NO: 39347 - protein, 14 aa, BK virus
CPNRPYGQYSLPGT

SEQ ID NO: 39348 - protein, 14 aa, BK virus
PNRPYGQYSLPGTG

SEQ ID NO: 39349 - protein, 14 aa, BK virus
NRPYGQYSLPGTGL

SEQ ID NO: 39350 - protein, 14 aa, BK virus
RPYGQYSLPGTGLL

SEQ ID NO: 39351 - protein, 14 aa, BK virus
PYGQYSLPGTGLLG

SEQ ID NO: 39352 - protein, 14 aa, BK virus
YGQYSLPGTGLLGF

SEQ ID NO: 39353 - protein, 14 aa, BK virus
YHQGTLTCNSLALP

SEQ ID NO: 39354 - protein, 14 aa, BK virus
HQGTLTCNSLALPA

SEQ ID NO: 39355 - protein, 14 aa, BK virus
QGTLTCNSLALPAF

SEQ ID NO: 39356 - protein, 14 aa, BK virus
GTLTCNSLALPAFP

SEQ ID NO: 39357 - protein, 14 aa, BK virus
TLTCNSLALPAFPR

SEQ ID NO: 39358 - protein, 14 aa, BK virus
LTCNSLALPAFPRV

SEQ ID NO: 39359 - protein, 14 aa, BK virus
TCNSLALPAFPRVL

SEQ ID NO: 39360 - protein, 14 aa, BK virus
CNSLALPAFPRVLH

SEQ ID NO: 39361 - protein, 14 aa, BK virus
NSLALPAFPRVLHL

SEQ ID NO: 39362 - protein, 14 aa, BK virus
SLALPAFPRVLHLQ

SEQ ID NO: 39363 - protein, 14 aa, BK virus
LALPAFPRVLHLQQ

SEQ ID NO: 39364 - protein, 14 aa, BK virus
ALPAFPRVLHLQQR

SEQ ID NO: 39365 - protein, 14 aa, BK virus
LPAFPRVLHLQQRS

SEQ ID NO: 39366 - protein, 14 aa, BK virus
PAFPRVLHLQQRSG

SEQ ID NO: 39367 - protein, 14 aa, BK virus
AFPRVLHLQQRSGN

SEQ ID NO: 39368 - protein, 14 aa, BK virus
FPRVLHLQQRSGNY

SEQ ID NO: 39369 - protein, 14 aa, BK virus
PRVLHLQQRSGNYC

SEQ ID NO: 39370 - protein, 14 aa, BK virus
RVLHLQQRSGNYCL

SEQ ID NO: 39371 - protein, 14 aa, BK virus
VLHLQQRSGNYCLE

SEQ ID NO: 39372 - protein, 14 aa, BK virus
VFLHHAHALFVTLH

SEQ ID NO: 39373 - protein, 14 aa, BK virus
FLHHAHALFVTLHE

SEQ ID NO: 39374 - protein, 14 aa, BK virus
LHHAHALFVTLHEG

SEQ ID NO: 39375 - protein, 14 aa, BK virus
PLFVQLQPPTSVDF

SEQ ID NO: 39376 - protein, 14 aa, BK virus
LFVQLQPPTSVDFH

SEQ ID NO: 39377 - protein, 14 aa, BK virus
FVQLQPPTSVDFHR

SEQ ID NO: 39378 - protein, 14 aa, BK virus
VQLQPPTSVDFHRL

SEQ ID NO: 39379 - protein, 14 aa, BK virus
QLQPPTSVDFHRLG

SEQ ID NO: 39380 - protein, 14 aa, BK virus
LQPPTSVDFHRLGP

SEQ ID NO: 39381 - protein, 14 aa, BK virus
QPPTSVDFHRLGPH

SEQ ID NO: 39382 - protein, 14 aa, BK virus
PPTSVDFHRLGPHL

SEQ ID NO: 39383 - protein, 14 aa, BK virus
PTSVDFHRLGPHLN

SEQ ID NO: 39384 - protein, 14 aa, BK virus
TSVDFHRLGPHLNW

SEQ ID NO: 39385 - protein, 14 aa, BK virus
SVDFHRLGPHLNWG

SEQ ID NO: 39386 - protein, 14 aa, BK virus
VDFHRLGPHLNWGG

SEQ ID NO: 39387 - protein, 14 aa, BK virus
DFHRLGPHLNWGGE

SEQ ID NO: 39388 - protein, 14 aa, BK virus
FHRLGPHLNWGGEF

SEQ ID NO: 39389 - protein, 14 aa, BK virus
HRLGPHLNWGGEFL

SEQ ID NO: 39390 - protein, 14 aa, BK virus
RLGPHLNWGGEFLL

SEQ ID NO: 39391 - protein, 14 aa, BK virus
LGPHLNWGGEFLLC

SEQ ID NO: 39392 - protein, 14 aa, BK virus
GPHLNWGGEFLLCC

SEQ ID NO: 39393 - protein, 14 aa, BK virus
PHLNWGGEFLLCCN

SEQ ID NO: 39394 - protein, 14 aa, BK virus
HLNWGGEFLLCCNR

SEQ ID NO: 39395 - protein, 14 aa, BK virus
LNWGGEFLLCCNRE

SEQ ID NO: 39396 - protein, 14 aa, BK virus
NWGGEFLLCCNREA

SEQ ID NO: 39397 - protein, 14 aa, BK virus
WGGEFLLCCNREAF

SEQ ID NO: 39398 - protein, 14 aa, BK virus
GGEFLLCCNREAFF

SEQ ID NO: 39399 - protein, 14 aa, BK virus
GEFLLCCNREAFFS

SEQ ID NO: 39400 - protein, 14 aa, BK virus
EFLLCCNREAFFSL

SEQ ID NO: 39401 - protein, 14 aa, BK virus
FLLCCNREAFFSLG

SEQ ID NO: 39402 - protein, 14 aa, BK virus
LLCCNREAFFSLGY

SEQ ID NO: 39403 - protein, 14 aa, BK virus
LCCNREAFFSLGYH

SEQ ID NO: 39404 - protein, 14 aa, BK virus
CCNREAFFSLGYHC

SEQ ID NO: 39405 - protein, 14 aa, BK virus
GFHLDPPFLGLGSI

SEQ ID NO: 39406 - protein, 14 aa, BK virus
FHLDPPFLGLGSIL

SEQ ID NO: 39407 - protein, 14 aa, BK virus
HLDPPFLGLGSILP

SEQ ID NO: 39408 - protein, 14 aa, BK virus
LDPPFLGLGSILPL

SEQ ID NO: 39409 - protein, 14 aa, BK virus
LLELLLLLLLVVLA

SEQ ID NO: 39410 - protein, 14 aa, BK virus
LELLLLLLLVVLAL

SEQ ID NO: 39411 - protein, 14 aa, BK virus
ELLLLLLLVVLALA

SEQ ID NO: 39412 - protein, 14 aa, BK virus
LLLLLLLVVLALAR

SEQ ID NO: 39413 - protein, 14 aa, BK virus
LLLLLLVVLALARV

SEQ ID NO: 39414 - protein, 14 aa, BK virus
LLLLLVVLALARVP

SEQ ID NO: 39415 - protein, 14 aa, BK virus
LLLLVVLALARVPL

SEQ ID NO: 39416 - protein, 14 aa, BK virus
LLLVVLALARVPLA

SEQ ID NO: 39417 - protein, 14 aa, BK virus
LLVVLALARVPLAF

SEQ ID NO: 39418 - protein, 14 aa, BK virus
LVVLALARVPLAFW

SEQ ID NO: 39419 - protein, 14 aa, BK virus
VVLALARVPLAFWE

SEQ ID NO: 39420 - protein, 14 aa, BK virus
VLALARVPLAFWEL

SEQ ID NO: 39421 - protein, 14 aa, BK virus
LALARVPLAFWELP

SEQ ID NO: 39422 - protein, 14 aa, BK virus
ALARVPLAFWELPL

SEQ ID NO: 39423 - protein, 14 aa, BK virus
LARVPLAFWELPLD

SEQ ID NO: 39424 - protein, 14 aa, BK virus
ARVPLAFWELPLDT

SEQ ID NO: 39425 - protein, 14 aa, BK virus
RVPLAFWELPLDTL

SEQ ID NO: 39426 - protein, 14 aa, BK virus
VPLAFWELPLDTLL

SEQ ID NO: 39427 - protein, 14 aa, BK virus
PLAFWELPLDTLLF

SEQ ID NO: 39428 - protein, 14 aa, BK virus
LAFWELPLDTLLFF

SEQ ID NO: 39429 - protein, 14 aa, BK virus
AFWELPLDTLLFFW

SEQ ID NO: 39430 - protein, 14 aa, BK virus
FWELPLDTLLFFWL

SEQ ID NO: 39431 - protein, 14 aa, BK virus
WELPLDTLLFFWLG

SEQ ID NO: 39432 - protein, 14 aa, BK virus
ELPLDTLLFFWLGP

SEQ ID NO: 39433 - protein, 14 aa, BK virus
LPLDTLLFFWLGPS

SEQ ID NO: 39434 - protein, 14 aa, BK virus
PLDTLLFFWLGPSS

SEQ ID NO: 39435 - protein, 14 aa, BK virus
LDTLLFFWLGPSSY

SEQ ID NO: 39436 - protein, 14 aa, BK virus
DTLLFFWLGPSSYA

SEQ ID NO: 39437 - protein, 14 aa, BK virus
TLLFFWLGPSSYAS

SEQ ID NO: 39438 - protein, 14 aa, BK virus
LLFFWLGPSSYASR

SEQ ID NO: 39439 - protein, 14 aa, BK virus
LFFWLGPSSYASRA

SEQ ID NO: 39440 - protein, 14 aa, BK virus
FFWLGPSSYASRAG

SEQ ID NO: 39441 - protein, 14 aa, BK virus
FWLGPSSYASRAGV

SEQ ID NO: 39442 - protein, 14 aa, BK virus
WLGPSSYASRAGVT

SEQ ID NO: 39443 - protein, 14 aa, BK virus
LGPSSYASRAGVTV

SEQ ID NO: 39444 - protein, 14 aa, BK virus
GPSSYASRAGVTVP

SEQ ID NO: 39445 - protein, 14 aa, BK virus
PSSYASRAGVTVPY

SEQ ID NO: 39446 - protein, 14 aa, BK virus
SSYASRAGVTVPYR

SEQ ID NO: 39447 - protein, 14 aa, BK virus
SYASRAGVTVPYRP

SEQ ID NO: 39448 - protein, 14 aa, BK virus
YASRAGVTVPYRPR

SEQ ID NO: 39449 - protein, 14 aa, BK virus
ASRAGVTVPYRPRS

SEQ ID NO: 39450 - protein, 14 aa, BK virus
SRAGVTVPYRPRSK

SEQ ID NO: 39451 - protein, 14 aa, BK virus
RAGVTVPYRPRSKG

SEQ ID NO: 39452 - protein, 14 aa, BK virus
AGVTVPYRPRSKGN

SEQ ID NO: 39453 - protein, 14 aa, BK virus
GVTVPYRPRSKGNI

SEQ ID NO: 39454 - protein, 14 aa, BK virus
VTVPYRPRSKGNIH

SEQ ID NO: 39455 - protein, 14 aa, BK virus
LAPPGAIVFSINSP

SEQ ID NO: 39456 - protein, 14 aa, BK virus
APPGAIVFSINSPE

SEQ ID NO: 39457 - protein, 14 aa, BK virus
PPGAIVFSINSPEC

SEQ ID NO: 39458 - protein, 14 aa, BK virus
PGAIVFSINSPECT

SEQ ID NO: 39459 - protein, 14 aa, BK virus
GAIVFSINSPECTL

SEQ ID NO: 39460 - protein, 14 aa, BK virus
AIVFSINSPECTLC

SEQ ID NO: 39461 - protein, 14 aa, BK virus
FLKSILCVTSSILS

SEQ ID NO: 39462 - protein, 14 aa, BK virus
LKSILCVTSSILSA

SEQ ID NO: 39463 - protein, 14 aa, BK virus
KSILCVTSSILSAS

SEQ ID NO: 39464 - protein, 14 aa, BK virus
SILCVTSSILSASS

SEQ ID NO: 39465 - protein, 14 aa, BK virus
ILCVTSSILSASSI

SEQ ID NO: 39466 - protein, 14 aa, BK virus
LCVTSSILSASSIL

SEQ ID NO: 39467 - protein, 14 aa, BK virus
VWPKCTRVPSLSAT

SEQ ID NO: 39468 - protein, 14 aa, BK virus
WPKCTRVPSLSATC

SEQ ID NO: 39469 - protein, 14 aa, BK virus
PKCTRVPSLSATCL

SEQ ID NO: 39470 - protein, 14 aa, BK virus
KCTRVPSLSATCLT

SEQ ID NO: 39471 - protein, 14 aa, BK virus
CTRVPSLSATCLTI

SEQ ID NO: 39472 - protein, 14 aa, BK virus
TRVPSLSATCLTIE

SEQ ID NO: 39473 - protein, 14 aa, BK virus
RVPSLSATCLTIEG

SEQ ID NO: 39474 - protein, 14 aa, BK virus
VPSLSATCLTIEGL

SEQ ID NO: 39475 - protein, 14 aa, BK virus
PSLSATCLTIEGLI

SEQ ID NO: 39476 - protein, 14 aa, BK virus
SLSATCLTIEGLIG

SEQ ID NO: 39477 - protein, 14 aa, BK virus
LSATCLTIEGLIGE

SEQ ID NO: 39478 - protein, 14 aa, BK virus
SATCLTIEGLIGER

SEQ ID NO: 39479 - protein, 14 aa, BK virus
ATCLTIEGLIGERS

SEQ ID NO: 39480 - protein, 14 aa, BK virus
TCLTIEGLIGERSE

SEQ ID NO: 39481 - protein, 14 aa, BK virus
KFIGAFTIVQVVSS

SEQ ID NO: 39482 - protein, 14 aa, BK virus
FIGAFTIVQVVSSK

SEQ ID NO: 39483 - protein, 14 aa, BK virus
IGAFTIVQVVSSKN

SEQ ID NO: 39484 - protein, 14 aa, BK virus
GAFTIVQVVSSKNL

SEQ ID NO: 39485 - protein, 14 aa, BK virus
AFTIVQVVSSKNLA

SEQ ID NO: 39486 - protein, 14 aa, BK virus
FTIVQVVSSKNLAK

SEQ ID NO: 39487 - protein, 14 aa, BK virus
TIVQVVSSKNLAKE

SEQ ID NO: 39488 - protein, 14 aa, BK virus
IVQVVSSKNLAKES

SEQ ID NO: 39489 - protein, 14 aa, BK virus
VQVVSSKNLAKESL

SEQ ID NO: 39490 - protein, 14 aa, BK virus
QVVSSKNLAKESLK

SEQ ID NO: 39491 - protein, 14 aa, BK virus
VVSSKNLAKESLKN

SEQ ID NO: 39492 - protein, 14 aa, BK virus
VSSKNLAKESLKNL

SEQ ID NO: 39493 - protein, 14 aa, BK virus
SSKNLAKESLKNLS

SEQ ID NO: 39494 - protein, 14 aa, BK virus
SKNLAKESLKNLSV

SEQ ID NO: 39495 - protein, 14 aa, BK virus
KNLAKESLKNLSVL

SEQ ID NO: 39496 - protein, 14 aa, BK virus
NLAKESLKNLSVLL

SEQ ID NO: 39497 - protein, 14 aa, BK virus
LAKESLKNLSVLLC

SEQ ID NO: 39498 - protein, 14 aa, BK virus
AKESLKNLSVLLCN

SEQ ID NO: 39499 - protein, 14 aa, BK virus
KESLKNLSVLLCNS

SEQ ID NO: 39500 - protein, 14 aa, BK virus
ESLKNLSVLLCNSC

SEQ ID NO: 39501 - protein, 14 aa, BK virus
SLKNLSVLLCNSCE

SEQ ID NO: 39502 - protein, 14 aa, BK virus
LKNLSVLLCNSCEV

SEQ ID NO: 39503 - protein, 14 aa, BK virus
KNLSVLLCNSCEVI

SEQ ID NO: 39504 - protein, 14 aa, BK virus
NLSVLLCNSCEVIE

SEQ ID NO: 39505 - protein, 14 aa, BK virus
LSVLLCNSCEVIEG

SEQ ID NO: 39506 - protein, 14 aa, BK virus
SVLLCNSCEVIEGI

SEQ ID NO: 39507 - protein, 14 aa, BK virus
VLLCNSCEVIEGIS

SEQ ID NO: 39508 - protein, 14 aa, BK virus
LLCNSCEVIEGISS

SEQ ID NO: 39509 - protein, 14 aa, BK virus
LCNSCEVIEGISSL

SEQ ID NO: 39510 - protein, 14 aa, BK virus
CNSCEVIEGISSLI

SEQ ID NO: 39511 - protein, 14 aa, BK virus
NSCEVIEGISSLIT

SEQ ID NO: 39512 - protein, 14 aa, BK virus
SCEVIEGISSLITC

SEQ ID NO: 39513 - protein, 14 aa, BK virus
CEVIEGISSLITCH

SEQ ID NO: 39514 - protein, 14 aa, BK virus
EVIEGISSLITCHK

SEQ ID NO: 39515 - protein, 14 aa, BK virus
VIEGISSLITCHKA

SEQ ID NO: 39516 - protein, 14 aa, BK virus
IEGISSLITCHKAW

SEQ ID NO: 39517 - protein, 14 aa, BK virus
EGISSLITCHKAWE

SEQ ID NO: 39518 - protein, 14 aa, BK virus
GISSLITCHKAWEI

SEQ ID NO: 39519 - protein, 14 aa, BK virus
ISSLITCHKAWEIV

SEQ ID NO: 39520 - protein, 14 aa, BK virus
SSLITCHKAWEIVA

SEQ ID NO: 39521 - protein, 14 aa, BK virus
SLITCHKAWEIVAN

SEQ ID NO: 39522 - protein, 14 aa, BK virus
LITCHKAWEIVANK

SEQ ID NO: 39523 - protein, 14 aa, BK virus
ITCHKAWEIVANKE

SEQ ID NO: 39524 - protein, 14 aa, BK virus
TCHKAWEIVANKEG

SEQ ID NO: 39525 - protein, 14 aa, BK virus
CHKAWEIVANKEGP

SEQ ID NO: 39526 - protein, 14 aa, BK virus
HKAWEIVANKEGPQ

SEQ ID NO: 39527 - protein, 14 aa, BK virus
KAWEIVANKEGPQC

SEQ ID NO: 39528 - protein, 14 aa, BK virus
AWEIVANKEGPQCL

SEQ ID NO: 39529 - protein, 14 aa, BK virus
WEIVANKEGPQCLG

SEQ ID NO: 39530 - protein, 14 aa, BK virus
EIVANKEGPQCLGS

SEQ ID NO: 39531 - protein, 14 aa, BK virus
IVANKEGPQCLGSR

SEQ ID NO: 39532 - protein, 14 aa, BK virus
VANKEGPQCLGSRY

SEQ ID NO: 39533 - protein, 14 aa, BK virus
ILLTKVFTPGNRIS

SEQ ID NO: 39534 - protein, 14 aa, BK virus
YSSGLNNSKAMPDC

SEQ ID NO: 39535 - protein, 14 aa, BK virus
IKAANPAIAPGAPA

SEQ ID NO: 39536 - protein, 14 aa, BK virus
KAANPAIAPGAPAI

SEQ ID NO: 39537 - protein, 14 aa, BK virus
AANPAIAPGAPAIT

SEQ ID NO: 39538 - protein, 14 aa, BK virus
ANPAIAPGAPAITA

SEQ ID NO: 39539 - protein, 14 aa, BK virus
NPAIAPGAPAITAY

SEQ ID NO: 39540 - protein, 14 aa, BK virus
PAIAPGAPAITAYV

SEQ ID NO: 39541 - protein, 14 aa, BK virus
GVRPIAAIASEVLV

SEQ ID NO: 39542 - protein, 14 aa, BK virus
VRPIAAIASEVLVM

SEQ ID NO: 39543 - protein, 14 aa, BK virus
RPIAAIASEVLVMP

SEQ ID NO: 39544 - protein, 14 aa, BK virus
PIAAIASEVLVMPS

SEQ ID NO: 39545 - protein, 14 aa, BK virus
IAAIASEVLVMPST

SEQ ID NO: 39546 - protein, 14 aa, BK virus
AAIASEVLVMPSTV

SEQ ID NO: 39547 - protein, 14 aa, BK virus
AIASEVLVMPSTVA

SEQ ID NO: 39548 - protein, 14 aa, BK virus
IASEVLVMPSTVAR

SEQ ID NO: 39549 - protein, 14 aa, BK virus
ASEVLVMPSTVARD

SEQ ID NO: 39550 - protein, 14 aa, BK virus
SEVLVMPSTVARDA

SEQ ID NO: 39551 - protein, 14 aa, BK virus
EVLVMPSTVARDAI

SEQ ID NO: 39552 - protein, 14 aa, BK virus
TSIAAAASPAAISA

SEQ ID NO: 39553 - protein, 14 aa, BK virus
SIAAAASPAAISAT

SEQ ID NO: 39554 - protein, 14 aa, BK virus
IAAAASPAAISATE

SEQ ID NO: 39555 - protein, 14 aa, BK virus
AAAASPAAISATEN

SEQ ID NO: 39556 - protein, 14 aa, BK virus
AAASPAAISATENP

SEQ ID NO: 39557 - protein, 14 aa, BK virus
AASPAAISATENPV

SEQ ID NO: 39558 - protein, 14 aa, BK virus
ASPAAISATENPVA

SEQ ID NO: 39559 - protein, 14 aa, BK virus
SPAAISATENPVAA

SEQ ID NO: 39560 - protein, 14 aa, BK virus
PAAISATENPVAAA

SEQ ID NO: 39561 - protein, 14 aa, BK virus
AAISATENPVAAAA

SEQ ID NO: 39562 - protein, 14 aa, BK virus
AISATENPVAAAAS

SEQ ID NO: 39563 - protein, 14 aa, BK virus
ISATENPVAAAASD

SEQ ID NO: 39564 - protein, 14 aa, BK virus
SATENPVAAAASDT

SEQ ID NO: 39565 - protein, 14 aa, BK virus
ATENPVAAAASDTL

SEQ ID NO: 39566 - protein, 14 aa, BK virus
TENPVAAAASDTLA

SEQ ID NO: 39567 - protein, 14 aa, BK virus
ENPVAAAASDTLAT

SEQ ID NO: 39568 - protein, 14 aa, BK virus
NPVAAAASDTLATR

SEQ ID NO: 39569 - protein, 14 aa, BK virus
PVAAAASDTLATRS

SEQ ID NO: 39570 - protein, 14 aa, BK virus
VAAAASDTLATRSP

SEQ ID NO: 39571 - protein, 14 aa, BK virus
AAAASDTLATRSPK

SEQ ID NO: 39572 - protein, 14 aa, BK virus
AAASDTLATRSPKS

SEQ ID NO: 39573 - protein, 14 aa, BK virus
AASDTLATRSPKSA

SEQ ID NO: 39574 - protein, 14 aa, BK virus
ASDTLATRSPKSAR

SEQ ID NO: 39575 - protein, 14 aa, BK virus
SDTLATRSPKSARA

SEQ ID NO: 39576 - protein, 14 aa, BK virus
DTLATRSPKSARAA

SEQ ID NO: 39577 - protein, 14 aa, BK virus
TLATRSPKSARAAP

SEQ ID NO: 39578 - protein, 14 aa, BK virus
LATRSPKSARAAPM

SEQ ID NO: 39579 - protein, 14 aa, BK virus
ATRSPKSARAAPMN

SEQ ID NO: 39580 - protein, 14 aa, BK virus
TRSPKSARAAPMNL

SEQ ID NO: 39581 - protein, 14 aa, BK virus
RSPKSARAAPMNLE

SEQ ID NO: 39582 - protein, 14 aa, BK virus
SPKSARAAPMNLEI

SEQ ID NO: 39583 - protein, 14 aa, BK virus
PKSARAAPMNLEIQ

SEQ ID NO: 39584 - protein, 14 aa, BK virus
KSARAAPMNLEIQK

SEQ ID NO: 39585 - protein, 14 aa, BK virus
SARAAPMNLEIQKK

SEQ ID NO: 39586 - protein, 14 aa, BK virus
ARAAPMNLEIQKKR

SEQ ID NO: 39587 - protein, 14 aa, BK virus
RAAPMNLEIQKKRD

SEQ ID NO: 39588 - protein, 14 aa, BK virus
AAPMNLEIQKKRDY

SEQ ID NO: 39589 - protein, 14 aa, BK virus
APMNLEIQKKRDYL

SEQ ID NO: 39590 - protein, 14 aa, BK virus
PMNLEIQKKRDYLP

SEQ ID NO: 39591 - protein, 14 aa, BK virus
MNLEIQKKRDYLPR

SEQ ID NO: 39592 - protein, 14 aa, BK virus
NLEIQKKRDYLPRS

SEQ ID NO: 39593 - protein, 14 aa, BK virus
LEIQKKRDYLPRSL

SEQ ID NO: 39594 - protein, 14 aa, BK virus
EIQKKRDYLPRSLL

SEQ ID NO: 39595 - protein, 14 aa, BK virus
IQKKRDYLPRSLLQ

SEQ ID NO: 39596 - protein, 14 aa, BK virus
QKKRDYLPRSLLQS

SEQ ID NO: 39597 - protein, 14 aa, BK virus
KKRDYLPRSLLQSL

SEQ ID NO: 39598 - protein, 14 aa, BK virus
KRDYLPRSLLQSLL

SEQ ID NO: 39599 - protein, 14 aa, BK virus
RDYLPRSLLQSLLQ

SEQ ID NO: 39600 - protein, 14 aa, BK virus
DYLPRSLLQSLLQQ

SEQ ID NO: 39601 - protein, 14 aa, BK virus
YLPRSLLQSLLQQV

SEQ ID NO: 39602 - protein, 14 aa, BK virus
LPRSLLQSLLQQVK

SEQ ID NO: 39603 - protein, 14 aa, BK virus
PRSLLQSLLQQVKQ

SEQ ID NO: 39604 - protein, 14 aa, BK virus
RSLLQSLLQQVKQW

SEQ ID NO: 39605 - protein, 14 aa, BK virus
SLLQSLLQQVKQWY

SEQ ID NO: 39606 - protein, 14 aa, BK virus
LLQSLLQQVKQWYF

SEQ ID NO: 39607 - protein, 14 aa, BK virus
LQSLLQQVKQWYFC

SEQ ID NO: 39608 - protein, 14 aa, BK virus
QSLLQQVKQWYFCF

SEQ ID NO: 39609 - protein, 14 aa, BK virus
SLLQQVKQWYFCFS

SEQ ID NO: 39610 - protein, 14 aa, BK virus
LLQQVKQWYFCFSR

SEQ ID NO: 39611 - protein, 14 aa, BK virus
LQQVKQWYFCFSRL

SEQ ID NO: 39612 - protein, 14 aa, BK virus
QQVKQWYFCFSRLH

SEQ ID NO: 39613 - protein, 14 aa, BK virus
QVKQWYFCFSRLHC

SEQ ID NO: 39614 - protein, 14 aa, BK virus
VKQWYFCFSRLHCL

SEQ ID NO: 39615 - protein, 14 aa, BK virus
KQWYFCFSRLHCLH

SEQ ID NO: 39616 - protein, 14 aa, BK virus
QWYFCFSRLHCLHL

SEQ ID NO: 39617 - protein, 14 aa, BK virus
WYFCFSRLHCLHLY

SEQ ID NO: 39618 - protein, 14 aa, BK virus
YFCFSRLHCLHLYK

SEQ ID NO: 39619 - protein, 14 aa, BK virus
FCFSRLHCLHLYKI

SEQ ID NO: 39620 - protein, 14 aa, BK virus
CFSRLHCLHLYKIP

SEQ ID NO: 39621 - protein, 14 aa, BK virus
FSRLHCLHLYKIPA

SEQ ID NO: 39622 - protein, 14 aa, BK virus
SRLHCLHLYKIPAK

SEQ ID NO: 39623 - protein, 14 aa, BK virus
RLHCLHLYKIPAKA

SEQ ID NO: 39624 - protein, 14 aa, BK virus
LHCLHLYKIPAKAL

SEQ ID NO: 39625 - protein, 14 aa, BK virus
HCLHLYKIPAKALK

SEQ ID NO: 39626 - protein, 14 aa, BK virus
KSSELFFLFQSRFY

SEQ ID NO: 39627 - protein, 14 aa, BK virus
SSELFFLFQSRFYQ

SEQ ID NO: 39628 - protein, 14 aa, BK virus
SELFFLFQSRFYQL

SEQ ID NO: 39629 - protein, 14 aa, BK virus
ELFFLFQSRFYQLS

SEQ ID NO: 39630 - protein, 14 aa, BK virus
LFFLFQSRFYQLSL

SEQ ID NO: 39631 - protein, 14 aa, BK virus
FFLFQSRFYQLSLK

SEQ ID NO: 39632 - protein, 14 aa, BK virus
FLFQSRFYQLSLKL

SEQ ID NO: 39633 - protein, 14 aa, BK virus
LFQSRFYQLSLKLV

SEQ ID NO: 39634 - protein, 14 aa, BK virus
FQSRFYQLSLKLVV

SEQ ID NO: 39635 - protein, 14 aa, BK virus
QSRFYQLSLKLVVT

SEQ ID NO: 39636 - protein, 14 aa, BK virus
SRFYQLSLKLVVTA

SEQ ID NO: 39637 - protein, 14 aa, BK virus
RFYQLSLKLVVTAG

SEQ ID NO: 39638 - protein, 14 aa, BK virus
FYQLSLKLVVTAGA

SEQ ID NO: 39639 - protein, 14 aa, BK virus
YQLSLKLVVTAGAE

SEQ ID NO: 39640 - protein, 14 aa, BK virus
QLSLKLVVTAGAEP

SEQ ID NO: 39641 - protein, 14 aa, BK virus
LSLKLVVTAGAEPW

SEQ ID NO: 39642 - protein, 14 aa, BK virus
SLKLVVTAGAEPWP

SEQ ID NO: 39643 - protein, 14 aa, BK virus
LKLVVTAGAEPWPL

SEQ ID NO: 39644 - protein, 14 aa, BK virus
KLVVTAGAEPWPLS

SEQ ID NO: 39645 - protein, 14 aa, BK virus
LVVTAGAEPWPLSS

SEQ ID NO: 39646 - protein, 14 aa, BK virus
VVTAGAEPWPLSSL

SEQ ID NO: 39647 - protein, 14 aa, BK virus
VTAGAEPWPLSSLT

SEQ ID NO: 39648 - protein, 14 aa, BK virus
TAGAEPWPLSSLTG

SEQ ID NO: 39649 - protein, 14 aa, BK virus
AGAEPWPLSSLTGD

SEQ ID NO: 39650 - protein, 14 aa, BK virus
GAEPWPLSSLTGDK

SEQ ID NO: 39651 - protein, 14 aa, BK virus
AEPWPLSSLTGDKA

SEQ ID NO: 39652 - protein, 14 aa, BK virus
EPWPLSSLTGDKAK

SEQ ID NO: 39653 - protein, 14 aa, BK virus
PWPLSSLTGDKAKI

SEQ ID NO: 39654 - protein, 14 aa, BK virus
WPLSSLTGDKAKIP

SEQ ID NO: 39655 - protein, 14 aa, BK virus
PLSSLTGDKAKIPR

SEQ ID NO: 39656 - protein, 14 aa, BK virus
LSSLTGDKAKIPRL

SEQ ID NO: 39657 - protein, 14 aa, BK virus
SSLTGDKAKIPRLA

SEQ ID NO: 39658 - protein, 14 aa, BK virus
SLTGDKAKIPRLAK

SEQ ID NO: 39659 - protein, 14 aa, BK virus
LTGDKAKIPRLAKH

SEQ ID NO: 39660 - protein, 14 aa, BK virus
TGDKAKIPRLAKHV

SEQ ID NO: 39661 - protein, 14 aa, BK virus
GDKAKIPRLAKHVC

SEQ ID NO: 39662 - protein, 14 aa, BK virus
DKAKIPRLAKHVCH

SEQ ID NO: 39663 - protein, 14 aa, BK virus
KAKIPRLAKHVCHA

SEQ ID NO: 39664 - protein, 14 aa, BK virus
AKIPRLAKHVCHAL

SEQ ID NO: 39665 - protein, 14 aa, BK virus
KIPRLAKHVCHALS

SEQ ID NO: 39666 - protein, 14 aa, BK virus
IPRLAKHVCHALSF

SEQ ID NO: 39667 - protein, 14 aa, BK virus
PRLAKHVCHALSFL

SEQ ID NO: 39668 - protein, 14 aa, BK virus
RLAKHVCHALSFLR

SEQ ID NO: 39669 - protein, 14 aa, BK virus
LAKHVCHALSFLRS

SEQ ID NO: 39670 - protein, 14 aa, BK virus
AKHVCHALSFLRSW

SEQ ID NO: 39671 - protein, 14 aa, BK virus
KHVCHALSFLRSWF

SEQ ID NO: 39672 - protein, 14 aa, BK virus
HVCHALSFLRSWFG

SEQ ID NO: 39673 - protein, 14 aa, BK virus
VCHALSFLRSWFGC

SEQ ID NO: 39674 - protein, 14 aa, BK virus
CHALSFLRSWFGCI

SEQ ID NO: 39675 - protein, 14 aa, BK virus
HALSFLRSWFGCIP

SEQ ID NO: 39676 - protein, 14 aa, BK virus
ALSFLRSWFGCIPW

SEQ ID NO: 39677 - protein, 14 aa, BK virus
LSFLRSWFGCIPWV

SEQ ID NO: 39678 - protein, 14 aa, BK virus
SFLRSWFGCIPWVS

SEQ ID NO: 39679 - protein, 14 aa, BK virus
FLRSWFGCIPWVSS

SEQ ID NO: 39680 - protein, 14 aa, BK virus
LRSWFGCIPWVSSS

SEQ ID NO: 39681 - protein, 14 aa, BK virus
RSWFGCIPWVSSSS

SEQ ID NO: 39682 - protein, 14 aa, BK virus
SWFGCIPWVSSSSL

SEQ ID NO: 39683 - protein, 14 aa, BK virus
GHGLAAFPCESCTF

SEQ ID NO: 39684 - protein, 14 aa, BK virus
HGLAAFPCESCTFL

SEQ ID NO: 39685 - protein, 14 aa, BK virus
GLAAFPCESCTFLP

SEQ ID NO: 39686 - protein, 14 aa, BK virus
LAAFPCESCTFLPE

SEQ ID NO: 39687 - protein, 14 aa, BK virus
AAFPCESCTFLPEV

SEQ ID NO: 39688 - protein, 14 aa, BK virus
AFPCESCTFLPEVM

SEQ ID NO: 39689 - protein, 14 aa, BK virus
FPCESCTFLPEVMV

SEQ ID NO: 39690 - protein, 14 aa, BK virus
PCESCTFLPEVMVW

SEQ ID NO: 39691 - protein, 14 aa, BK virus
CESCTFLPEVMVWL

SEQ ID NO: 39692 - protein, 14 aa, BK virus
ESCTFLPEVMVWLH

SEQ ID NO: 39693 - protein, 14 aa, BK virus
SCTFLPEVMVWLHS

SEQ ID NO: 39694 - protein, 14 aa, BK virus
CTFLPEVMVWLHSM

SEQ ID NO: 39695 - protein, 14 aa, BK virus
TFLPEVMVWLHSMG

SEQ ID NO: 39696 - protein, 14 aa, BK virus
FLPEVMVWLHSMGK

SEQ ID NO: 39697 - protein, 14 aa, BK virus
LPEVMVWLHSMGKQ

SEQ ID NO: 39698 - protein, 14 aa, BK virus
PEVMVWLHSMGKQL

SEQ ID NO: 39699 - protein, 14 aa, BK virus
EVMVWLHSMGKQLL

SEQ ID NO: 39700 - protein, 14 aa, BK virus
VMVWLHSMGKQLLP

SEQ ID NO: 39701 - protein, 14 aa, BK virus
MVWLHSMGKQLLPV

SEQ ID NO: 39702 - protein, 14 aa, BK virus
VWLHSMGKQLLPVA

SEQ ID NO: 39703 - protein, 14 aa, BK virus
WLHSMGKQLLPVAF

SEQ ID NO: 39704 - protein, 14 aa, BK virus
LHSMGKQLLPVAFF

SEQ ID NO: 39705 - protein, 14 aa, BK virus
HSMGKQLLPVAFFF

SEQ ID NO: 39706 - protein, 14 aa, BK virus
SMGKQLLPVAFFFI

SEQ ID NO: 39707 - protein, 14 aa, BK virus
MGKQLLPVAFFFII

SEQ ID NO: 39708 - protein, 14 aa, BK virus
GKQLLPVAFFFIIY

SEQ ID NO: 39709 - protein, 14 aa, BK virus
KQLLPVAFFFIIYK

SEQ ID NO: 39710 - protein, 14 aa, BK virus
QLLPVAFFFIIYKR

SEQ ID NO: 39711 - protein, 14 aa, BK virus
LLPVAFFFIIYKRP

SEQ ID NO: 39712 - protein, 14 aa, BK virus
LPVAFFFIIYKRPR

SEQ ID NO: 39713 - protein, 14 aa, BK virus
PVAFFFIIYKRPRP

SEQ ID NO: 39714 - protein, 14 aa, BK virus
VAFFFIIYKRPRPP

SEQ ID NO: 39715 - protein, 14 aa, BK virus
AFFFIIYKRPRPPL

SEQ ID NO: 39716 - protein, 14 aa, BK virus
FFFIIYKRPRPPLP

SEQ ID NO: 39717 - protein, 14 aa, BK virus
FFIIYKRPRPPLPP

SEQ ID NO: 39718 - protein, 14 aa, BK virus
FIIYKRPRPPLPPP

SEQ ID NO: 39719 - protein, 14 aa, BK virus
IIYKRPRPPLPPPF

SEQ ID NO: 39720 - protein, 14 aa, BK virus
IYKRPRPPLPPPFL

SEQ ID NO: 39721 - protein, 14 aa, BK virus
YKRPRPPLPPPFLS

SEQ ID NO: 39722 - protein, 14 aa, BK virus
KRPRPPLPPPFLSS

SEQ ID NO: 39723 - protein, 14 aa, BK virus
RPRPPLPPPFLSSS

SEQ ID NO: 39724 - protein, 14 aa, BK virus
PRPPLPPPFLSSSK

SEQ ID NO: 39725 - protein, 14 aa, BK virus
RPPLPPPFLSSSKG

SEQ ID NO: 39726 - protein, 14 aa, BK virus
PPLPPPFLSSSKGV

SEQ ID NO: 39727 - protein, 14 aa, BK virus
PLPPPFLSSSKGVE

SEQ ID NO: 39728 - protein, 14 aa, BK virus
LPPPFLSSSKGVEA

SEQ ID NO: 39729 - protein, 14 aa, BK virus
PPPFLSSSKGVEAF

SEQ ID NO: 39730 - protein, 14 aa, BK virus
PPFLSSSKGVEAFS

SEQ ID NO: 39731 - protein, 14 aa, BK virus
PFLSSSKGVEAFSE

SEQ ID NO: 39732 - protein, 14 aa, BK virus
FLSSSKGVEAFSEA

SEQ ID NO: 39733 - protein, 14 aa, BK virus
QNYLGKSLFFCNFC

SEQ ID NO: 39734 - protein, 14 aa, BK virus
NYLGKSLFFCNFCK

SEQ ID NO: 39735 - protein, 15 aa, BK virus
WIKFLTGKNPWSSWT

SEQ ID NO: 39736 - protein, 15 aa, BK virus
IKFLTGKNPWSSWTF

SEQ ID NO: 39737 - protein, 15 aa, BK virus
GSVRNFTLTKGATRI

SEQ ID NO: 39738 - protein, 15 aa, BK virus
SVRNFTLTKGATRIK

SEQ ID NO: 39739 - protein, 15 aa, BK virus
LISLILEPGVAQRFV

SEQ ID NO: 39740 - protein, 15 aa, BK virus
ISLILEPGVAQRFVL

SEQ ID NO: 39741 - protein, 15 aa, BK virus
SLILEPGVAQRFVLI

SEQ ID NO: 39742 - protein, 15 aa, BK virus
LILEPGVAQRFVLIF

SEQ ID NO: 39743 - protein, 15 aa, BK virus
ILEPGVAQRFVLIFL

SEQ ID NO: 39744 - protein, 15 aa, BK virus
LEPGVAQRFVLIFLF

SEQ ID NO: 39745 - protein, 15 aa, BK virus
EPGVAQRFVLIFLFA

SEQ ID NO: 39746 - protein, 15 aa, BK virus
PGVAQRFVLIFLFAQ

SEQ ID NO: 39747 - protein, 15 aa, BK virus
GVAQRFVLIFLFAQI

SEQ ID NO: 39748 - protein, 15 aa, BK virus
VAQRFVLIFLFAQIP

SEQ ID NO: 39749 - protein, 15 aa, BK virus
AQRFVLIFLFAQIPC

SEQ ID NO: 39750 - protein, 15 aa, BK virus
QRFVLIFLFAQIPCT

SEQ ID NO: 39751 - protein, 15 aa, BK virus
RFVLIFLFAQIPCTA

SEQ ID NO: 39752 - protein, 15 aa, BK virus
FVLIFLFAQIPCTAR

SEQ ID NO: 39753 - protein, 15 aa, BK virus
VLIFLFAQIPCTARN

SEQ ID NO: 39754 - protein, 15 aa, BK virus
LIFLFAQIPCTARNG

SEQ ID NO: 39755 - protein, 15 aa, BK virus
IFLFAQIPCTARNGL

SEQ ID NO: 39756 - protein, 15 aa, BK virus
FLFAQIPCTARNGLF

SEQ ID NO: 39757 - protein, 15 aa, BK virus
LFAQIPCTARNGLFV

SEQ ID NO: 39758 - protein, 15 aa, BK virus
FAQIPCTARNGLFVP

SEQ ID NO: 39759 - protein, 15 aa, BK virus
AQIPCTARNGLFVPK

SEQ ID NO: 39760 - protein, 15 aa, BK virus
QIPCTARNGLFVPKS

SEQ ID NO: 39761 - protein, 15 aa, BK virus
IPCTARNGLFVPKSL

SEQ ID NO: 39762 - protein, 15 aa, BK virus
PCTARNGLFVPKSLL

SEQ ID NO: 39763 - protein, 15 aa, BK virus
CTARNGLFVPKSLLC

SEQ ID NO: 39764 - protein, 15 aa, BK virus
TARNGLFVPKSLLCT

SEQ ID NO: 39765 - protein, 15 aa, BK virus
ARNGLFVPKSLLCTA

SEQ ID NO: 39766 - protein, 15 aa, BK virus
RNGLFVPKSLLCTAL

SEQ ID NO: 39767 - protein, 15 aa, BK virus
NGLFVPKSLLCTALA

SEQ ID NO: 39768 - protein, 15 aa, BK virus
GLFVPKSLLCTALAC

SEQ ID NO: 39769 - protein, 15 aa, BK virus
LFVPKSLLCTALACY

SEQ ID NO: 39770 - protein, 15 aa, BK virus
FVPKSLLCTALACYV

SEQ ID NO: 39771 - protein, 15 aa, BK virus
VPKSLLCTALACYVS

SEQ ID NO: 39772 - protein, 15 aa, BK virus
PKSLLCTALACYVSL

SEQ ID NO: 39773 - protein, 15 aa, BK virus
KSLLCTALACYVSLD

SEQ ID NO: 39774 - protein, 15 aa, BK virus
VIIFFIGANLWNRRV

SEQ ID NO: 39775 - protein, 15 aa, BK virus
IIFFIGANLWNRRVG

SEQ ID NO: 39776 - protein, 15 aa, BK virus
IFFIGANLWNRRVGV

SEQ ID NO: 39777 - protein, 15 aa, BK virus
FFIGANLWNRRVGVL

SEQ ID NO: 39778 - protein, 15 aa, BK virus
FIGANLWNRRVGVLV

SEQ ID NO: 39779 - protein, 15 aa, BK virus
IGANLWNRRVGVLVE

SEQ ID NO: 39780 - protein, 15 aa, BK virus
GANLWNRRVGVLVEF

SEQ ID NO: 39781 - protein, 15 aa, BK virus
ANLWNRRVGVLVEFL

SEQ ID NO: 39782 - protein, 15 aa, BK virus
RSNSRFSTLNTTQKK

SEQ ID NO: 39783 - protein, 15 aa, BK virus
SNSRFSTLNTTQKKK

SEQ ID NO: 39784 - protein, 15 aa, BK virus
NSRFSTLNTTQKKKK

SEQ ID NO: 39785 - protein, 15 aa, BK virus
SRFSTLNTTQKKKKG

SEQ ID NO: 39786 - protein, 15 aa, BK virus
RFSTLNTTQKKKKGR

SEQ ID NO: 39787 - protein, 15 aa, BK virus
FSTLNTTQKKKKGRR

SEQ ID NO: 39788 - protein, 15 aa, BK virus
STLNTTQKKKKGRRP

SEQ ID NO: 39789 - protein, 15 aa, BK virus
RSIPYYRRKHSRGLK

SEQ ID NO: 39790 - protein, 15 aa, BK virus
SIPYYRRKHSRGLKG

SEQ ID NO: 39791 - protein, 15 aa, BK virus
IPYYRRKHSRGLKGA

SEQ ID NO: 39792 - protein, 15 aa, BK virus
GCVFIIRYVFRISIQ

SEQ ID NO: 39793 - protein, 15 aa, BK virus
CVFIIRYVFRISIQC

SEQ ID NO: 39794 - protein, 15 aa, BK virus
VFIIRYVFRISIQCR

SEQ ID NO: 39795 - protein, 15 aa, BK virus
FIIRYVFRISIQCRG

SEQ ID NO: 39796 - protein, 15 aa, BK virus
IIRYVFRISIQCRGV

SEQ ID NO: 39797 - protein, 15 aa, BK virus
KSKKYLSASSRYSFS

SEQ ID NO: 39798 - protein, 15 aa, BK virus
KKSRYPSYDQGRNAN

SEQ ID NO: 39799 - protein, 15 aa, BK virus
KSRYPSYDQGRNANR

SEQ ID NO: 39800 - protein, 15 aa, BK virus
SRYPSYDQGRNANRK

SEQ ID NO: 39801 - protein, 15 aa, BK virus
RYPSYDQGRNANRKI

SEQ ID NO: 39802 - protein, 15 aa, BK virus
YPSYDQGRNANRKIQ

SEQ ID NO: 39803 - protein, 15 aa, BK virus
PSYDQGRNANRKIQS

SEQ ID NO: 39804 - protein, 15 aa, BK virus
SYDQGRNANRKIQSY

SEQ ID NO: 39805 - protein, 15 aa, BK virus
YDQGRNANRKIQSYI

SEQ ID NO: 39806 - protein, 15 aa, BK virus
DQGRNANRKIQSYIR

SEQ ID NO: 39807 - protein, 15 aa, BK virus
NGFNIWSSWKCCTRT

SEQ ID NO: 39808 - protein, 15 aa, BK virus
GFNIWSSWKCCTRTI

SEQ ID NO: 39809 - protein, 15 aa, BK virus
FNIWSSWKCCTRTIY

SEQ ID NO: 39810 - protein, 15 aa, BK virus
NIWSSWKCCTRTIYG

SEQ ID NO: 39811 - protein, 15 aa, BK virus
IWSSWKCCTRTIYGR

SEQ ID NO: 39812 - protein, 15 aa, BK virus
WSSWKCCTRTIYGRC

SEQ ID NO: 39813 - protein, 15 aa, BK virus
SSWKCCTRTIYGRCC

SEQ ID NO: 39814 - protein, 15 aa, BK virus
SWKCCTRTIYGRCCL

SEQ ID NO: 39815 - protein, 15 aa, BK virus
WKCCTRTIYGRCCLA

SEQ ID NO: 39816 - protein, 15 aa, BK virus
KCCTRTIYGRCCLAA

SEQ ID NO: 39817 - protein, 15 aa, BK virus
CCTRTIYGRCCLAAL

SEQ ID NO: 39818 - protein, 15 aa, BK virus
CTRTIYGRCCLAALF

SEQ ID NO: 39819 - protein, 15 aa, BK virus
TRTIYGRCCLAALFA

SEQ ID NO: 39820 - protein, 15 aa, BK virus
RTIYGRCCLAALFAT

SEQ ID NO: 39821 - protein, 15 aa, BK virus
WKNNTSCRVIRFVWW

SEQ ID NO: 39822 - protein, 15 aa, BK virus
IKGFAFRTWNKQFRQ

SEQ ID NO: 39823 - protein, 15 aa, BK virus
KGFAFRTWNKQFRQF

SEQ ID NO: 39824 - protein, 15 aa, BK virus
GFAFRTWNKQFRQFE

SEQ ID NO: 39825 - protein, 15 aa, BK virus
FAFRTWNKQFRQFER

SEQ ID NO: 39826 - protein, 15 aa, BK virus
AFRTWNKQFRQFERL

SEQ ID NO: 39827 - protein, 15 aa, BK virus
FRTWNKQFRQFERLF

SEQ ID NO: 39828 - protein, 15 aa, BK virus
RTWNKQFRQFERLFR

SEQ ID NO: 39829 - protein, 15 aa, BK virus
TWNKQFRQFERLFRW

SEQ ID NO: 39830 - protein, 15 aa, BK virus
WNKQFRQFERLFRWK

SEQ ID NO: 39831 - protein, 15 aa, BK virus
NKQFRQFERLFRWKC

SEQ ID NO: 39832 - protein, 15 aa, BK virus
GKFRKETFKQKNPNI

SEQ ID NO: 39833 - protein, 15 aa, BK virus
KFRKETFKQKNPNIS

SEQ ID NO: 39834 - protein, 15 aa, BK virus
FRKETFKQKNPNIST

SEQ ID NO: 39835 - protein, 15 aa, BK virus
RKETFKQKNPNISTR

SEQ ID NO: 39836 - protein, 15 aa, BK virus
KETFKQKNPNISTRL

SEQ ID NO: 39837 - protein, 15 aa, BK virus
ETFKQKNPNISTRLG

SEQ ID NO: 39838 - protein, 15 aa, BK virus
TFKQKNPNISTRLGY

SEQ ID NO: 39839 - protein, 15 aa, BK virus
FKQKNPNISTRLGYN

SEQ ID NO: 39840 - protein, 15 aa, BK virus
KQKNPNISTRLGYNE

SEQ ID NO: 39841 - protein, 15 aa, BK virus
AQNIFKKILTKLRVL

SEQ ID NO: 39842 - protein, 15 aa, BK virus
QNIFKKILTKLRVLT

SEQ ID NO: 39843 - protein, 15 aa, BK virus
KKNFTKWNDLVATAN

SEQ ID NO: 39844 - protein, 15 aa, BK virus
KNFTKWNDLVATANL

SEQ ID NO: 39845 - protein, 15 aa, BK virus
NFTKWNDLVATANLV

SEQ ID NO: 39846 - protein, 15 aa, BK virus
IPITMLFPSLRYFSP

SEQ ID NO: 39847 - protein, 15 aa, BK virus
PITMLFPSLRYFSPC

SEQ ID NO: 39848 - protein, 15 aa, BK virus
KWLIQKQHLLNVYVQ

SEQ ID NO: 39849 - protein, 15 aa, BK virus
KHLFKAFWFAIVPVC

SEQ ID NO: 39850 - protein, 15 aa, BK virus
HLFKAFWFAIVPVCQ

SEQ ID NO: 39851 - protein, 15 aa, BK virus
LFKAFWFAIVPVCQY

SEQ ID NO: 39852 - protein, 15 aa, BK virus
FKAFWFAIVPVCQYI

SEQ ID NO: 39853 - protein, 15 aa, BK virus
KAFWFAIVPVCQYIL

SEQ ID NO: 39854 - protein, 15 aa, BK virus
AFWFAIVPVCQYILS

SEQ ID NO: 39855 - protein, 15 aa, BK virus
FWFAIVPVCQYILSY

SEQ ID NO: 39856 - protein, 15 aa, BK virus
WFAIVPVCQYILSYL

SEQ ID NO: 39857 - protein, 15 aa, BK virus
FAIVPVCQYILSYLG

SEQ ID NO: 39858 - protein, 15 aa, BK virus
AIVPVCQYILSYLGP

SEQ ID NO: 39859 - protein, 15 aa, BK virus
IVPVCQYILSYLGPL

SEQ ID NO: 39860 - protein, 15 aa, BK virus
VPVCQYILSYLGPLE

SEQ ID NO: 39861 - protein, 15 aa, BK virus
PVCQYILSYLGPLEV

SEQ ID NO: 39862 - protein, 15 aa, BK virus
VCQYILSYLGPLEVF

SEQ ID NO: 39863 - protein, 15 aa, BK virus
CQYILSYLGPLEVFL

SEQ ID NO: 39864 - protein, 15 aa, BK virus
QYILSYLGPLEVFLC

SEQ ID NO: 39865 - protein, 15 aa, BK virus
YILSYLGPLEVFLCH

SEQ ID NO: 39866 - protein, 15 aa, BK virus
ILSYLGPLEVFLCHQ

SEQ ID NO: 39867 - protein, 15 aa, BK virus
LSYLGPLEVFLCHQT

SEQ ID NO: 39868 - protein, 15 aa, BK virus
SYLGPLEVFLCHQTP

SEQ ID NO: 39869 - protein, 15 aa, BK virus
GHLAKRKLGKDSLQI

SEQ ID NO: 39870 - protein, 15 aa, BK virus
HLAKRKLGKDSLQIF

SEQ ID NO: 39871 - protein, 15 aa, BK virus
LAKRKLGKDSLQIFF

SEQ ID NO: 39872 - protein, 15 aa, BK virus
AKRKLGKDSLQIFFS

SEQ ID NO: 39873 - protein, 15 aa, BK virus
KRKLGKDSLQIFFSG

SEQ ID NO: 39874 - protein, 15 aa, BK virus
RKLGKDSLQIFFSGG

SEQ ID NO: 39875 - protein, 15 aa, BK virus
KLGKDSLQIFFSGGS

SEQ ID NO: 39876 - protein, 15 aa, BK virus
TGHKYQQLKHTGYQL

SEQ ID NO: 39877 - protein, 15 aa, BK virus
GHKYQQLKHTGYQLY

SEQ ID NO: 39878 - protein, 15 aa, BK virus
HKYQQLKHTGYQLYK

SEQ ID NO: 39879 - protein, 15 aa, BK virus
KYQQLKHTGYQLYKE

SEQ ID NO: 39880 - protein, 15 aa, BK virus
YQQLKHTGYQLYKEA

SEQ ID NO: 39881 - protein, 15 aa, BK virus
QQLKHTGYQLYKEAP

SEQ ID NO: 39882 - protein, 15 aa, BK virus
QLKHTGYQLYKEAPH

SEQ ID NO: 39883 - protein, 15 aa, BK virus
LKHTGYQLYKEAPHP

SEQ ID NO: 39884 - protein, 15 aa, BK virus
KHTGYQLYKEAPHPV

SEQ ID NO: 39885 - protein, 15 aa, BK virus
HTGYQLYKEAPHPVH

SEQ ID NO: 39886 - protein, 15 aa, BK virus
TGYQLYKEAPHPVHL

SEQ ID NO: 39887 - protein, 15 aa, BK virus
GYQLYKEAPHPVHLA

SEQ ID NO: 39888 - protein, 15 aa, BK virus
YQLYKEAPHPVHLAT

SEQ ID NO: 39889 - protein, 15 aa, BK virus
QLYKEAPHPVHLATL

SEQ ID NO: 39890 - protein, 15 aa, BK virus
LYKEAPHPVHLATLW

SEQ ID NO: 39891 - protein, 15 aa, BK virus
LCWSHEVLGEHFPLL

SEQ ID NO: 39892 - protein, 15 aa, BK virus
HFHFYWDQVPSTQLD

SEQ ID NO: 39893 - protein, 15 aa, BK virus
FHFYWDQVPSTQLDK

SEQ ID NO: 39894 - protein, 15 aa, BK virus
HFYWDQVPSTQLDKH

SEQ ID NO: 39895 - protein, 15 aa, BK virus
FYWDQVPSTQLDKHC

SEQ ID NO: 39896 - protein, 15 aa, BK virus
YWDQVPSTQLDKHCF

SEQ ID NO: 39897 - protein, 15 aa, BK virus
WDQVPSTQLDKHCFC

SEQ ID NO: 39898 - protein, 15 aa, BK virus
DQVPSTQLDKHCFCP

SEQ ID NO: 39899 - protein, 15 aa, BK virus
QVPSTQLDKHCFCPN

SEQ ID NO: 39900 - protein, 15 aa, BK virus
VPSTQLDKHCFCPNR

SEQ ID NO: 39901 - protein, 15 aa, BK virus
PSTQLDKHCFCPNRP

SEQ ID NO: 39902 - protein, 15 aa, BK virus
STQLDKHCFCPNRPY

SEQ ID NO: 39903 - protein, 15 aa, BK virus
TQLDKHCFCPNRPYG

SEQ ID NO: 39904 - protein, 15 aa, BK virus
QLDKHCFCPNRPYGQ

SEQ ID NO: 39905 - protein, 15 aa, BK virus
LDKHCFCPNRPYGQY

SEQ ID NO: 39906 - protein, 15 aa, BK virus
DKHCFCPNRPYGQYS

SEQ ID NO: 39907 - protein, 15 aa, BK virus
KHCFCPNRPYGQYSL

SEQ ID NO: 39908 - protein, 15 aa, BK virus
HCFCPNRPYGQYSLP

SEQ ID NO: 39909 - protein, 15 aa, BK virus
CFCPNRPYGQYSLPG

SEQ ID NO: 39910 - protein, 15 aa, BK virus
FCPNRPYGQYSLPGT

SEQ ID NO: 39911 - protein, 15 aa, BK virus
CPNRPYGQYSLPGTG

SEQ ID NO: 39912 - protein, 15 aa, BK virus
PNRPYGQYSLPGTGL

SEQ ID NO: 39913 - protein, 15 aa, BK virus
NRPYGQYSLPGTGLL

SEQ ID NO: 39914 - protein, 15 aa, BK virus
RPYGQYSLPGTGLLG

SEQ ID NO: 39915 - protein, 15 aa, BK virus
PYGQYSLPGTGLLGF

SEQ ID NO: 39916 - protein, 15 aa, BK virus
YHQGTLTCNSLALPA

SEQ ID NO: 39917 - protein, 15 aa, BK virus
HQGTLTCNSLALPAF

SEQ ID NO: 39918 - protein, 15 aa, BK virus
QGTLTCNSLALPAFP

SEQ ID NO: 39919 - protein, 15 aa, BK virus
GTLTCNSLALPAFPR

SEQ ID NO: 39920 - protein, 15 aa, BK virus
TLTCNSLALPAFPRV

SEQ ID NO: 39921 - protein, 15 aa, BK virus
LTCNSLALPAFPRVL

SEQ ID NO: 39922 - protein, 15 aa, BK virus
TCNSLALPAFPRVLH

SEQ ID NO: 39923 - protein, 15 aa, BK virus
CNSLALPAFPRVLHL

SEQ ID NO: 39924 - protein, 15 aa, BK virus
NSLALPAFPRVLHLQ

SEQ ID NO: 39925 - protein, 15 aa, BK virus
SLALPAFPRVLHLQQ

SEQ ID NO: 39926 - protein, 15 aa, BK virus
LALPAFPRVLHLQQR

SEQ ID NO: 39927 - protein, 15 aa, BK virus
ALPAFPRVLHLQQRS

SEQ ID NO: 39928 - protein, 15 aa, BK virus
LPAFPRVLHLQQRSG

SEQ ID NO: 39929 - protein, 15 aa, BK virus
PAFPRVLHLQQRSGN

SEQ ID NO: 39930 - protein, 15 aa, BK virus
AFPRVLHLQQRSGNY

SEQ ID NO: 39931 - protein, 15 aa, BK virus
FPRVLHLQQRSGNYC

SEQ ID NO: 39932 - protein, 15 aa, BK virus
PRVLHLQQRSGNYCL

SEQ ID NO: 39933 - protein, 15 aa, BK virus
RVLHLQQRSGNYCLE

SEQ ID NO: 39934 - protein, 15 aa, BK virus
VFLHHAHALFVTLHE

SEQ ID NO: 39935 - protein, 15 aa, BK virus
FLHHAHALFVTLHEG

SEQ ID NO: 39936 - protein, 15 aa, BK virus
PLFVQLQPPTSVDFH

SEQ ID NO: 39937 - protein, 15 aa, BK virus
LFVQLQPPTSVDFHR

SEQ ID NO: 39938 - protein, 15 aa, BK virus
FVQLQPPTSVDFHRL

SEQ ID NO: 39939 - protein, 15 aa, BK virus
VQLQPPTSVDFHRLG

SEQ ID NO: 39940 - protein, 15 aa, BK virus
QLQPPTSVDFHRLGP

SEQ ID NO: 39941 - protein, 15 aa, BK virus
LQPPTSVDFHRLGPH

SEQ ID NO: 39942 - protein, 15 aa, BK virus
QPPTSVDFHRLGPHL

SEQ ID NO: 39943 - protein, 15 aa, BK virus
PPTSVDFHRLGPHLN

SEQ ID NO: 39944 - protein, 15 aa, BK virus
PTSVDFHRLGPHLNW

SEQ ID NO: 39945 - protein, 15 aa, BK virus
TSVDFHRLGPHLNWG

SEQ ID NO: 39946 - protein, 15 aa, BK virus
SVDFHRLGPHLNWGG

SEQ ID NO: 39947 - protein, 15 aa, BK virus
VDFHRLGPHLNWGGE

SEQ ID NO: 39948 - protein, 15 aa, BK virus
DFHRLGPHLNWGGEF

SEQ ID NO: 39949 - protein, 15 aa, BK virus
FHRLGPHLNWGGEFL

SEQ ID NO: 39950 - protein, 15 aa, BK virus
HRLGPHLNWGGEFLL

SEQ ID NO: 39951 - protein, 15 aa, BK virus
RLGPHLNWGGEFLLC

SEQ ID NO: 39952 - protein, 15 aa, BK virus
LGPHLNWGGEFLLCC

SEQ ID NO: 39953 - protein, 15 aa, BK virus
GPHLNWGGEFLLCCN

SEQ ID NO: 39954 - protein, 15 aa, BK virus
PHLNWGGEFLLCCNR

SEQ ID NO: 39955 - protein, 15 aa, BK virus
HLNWGGEFLLCCNRE

SEQ ID NO: 39956 - protein, 15 aa, BK virus
LNWGGEFLLCCNREA

SEQ ID NO: 39957 - protein, 15 aa, BK virus
NWGGEFLLCCNREAF

SEQ ID NO: 39958 - protein, 15 aa, BK virus
WGGEFLLCCNREAFF

SEQ ID NO: 39959 - protein, 15 aa, BK virus
GGEFLLCCNREAFFS

SEQ ID NO: 39960 - protein, 15 aa, BK virus
GEFLLCCNREAFFSL

SEQ ID NO: 39961 - protein, 15 aa, BK virus
EFLLCCNREAFFSLG

SEQ ID NO: 39962 - protein, 15 aa, BK virus
FLLCCNREAFFSLGY

SEQ ID NO: 39963 - protein, 15 aa, BK virus
LLCCNREAFFSLGYH

SEQ ID NO: 39964 - protein, 15 aa, BK virus
LCCNREAFFSLGYHC

SEQ ID NO: 39965 - protein, 15 aa, BK virus
GFHLDPPFLGLGSIL

SEQ ID NO: 39966 - protein, 15 aa, BK virus
FHLDPPFLGLGSILP

SEQ ID NO: 39967 - protein, 15 aa, BK virus
HLDPPFLGLGSILPL

SEQ ID NO: 39968 - protein, 15 aa, BK virus
LLELLLLLLLVVLAL

SEQ ID NO: 39969 - protein, 15 aa, BK virus
LELLLLLLLVVLALA

SEQ ID NO: 39970 - protein, 15 aa, BK virus
ELLLLLLLVVLALAR

SEQ ID NO: 39971 - protein, 15 aa, BK virus
LLLLLLLVVLALARV

SEQ ID NO: 39972 - protein, 15 aa, BK virus
LLLLLLVVLALARVP

SEQ ID NO: 39973 - protein, 15 aa, BK virus
LLLLLVVLALARVPL

SEQ ID NO: 39974 - protein, 15 aa, BK virus
LLLLVVLALARVPLA

SEQ ID NO: 39975 - protein, 15 aa, BK virus
LLLVVLALARVPLAF

SEQ ID NO: 39976 - protein, 15 aa, BK virus
LLVVLALARVPLAFW

SEQ ID NO: 39977 - protein, 15 aa, BK virus
LVVLALARVPLAFWE

SEQ ID NO: 39978 - protein, 15 aa, BK virus
VVLALARVPLAFWEL

SEQ ID NO: 39979 - protein, 15 aa, BK virus
VLALARVPLAFWELP

SEQ ID NO: 39980 - protein, 15 aa, BK virus
LALARVPLAFWELPL

SEQ ID NO: 39981 - protein, 15 aa, BK virus
ALARVPLAFWELPLD

SEQ ID NO: 39982 - protein, 15 aa, BK virus
LARVPLAFWELPLDT

SEQ ID NO: 39983 - protein, 15 aa, BK virus
ARVPLAFWELPLDTL

SEQ ID NO: 39984 - protein, 15 aa, BK virus
RVPLAFWELPLDTLL

SEQ ID NO: 39985 - protein, 15 aa, BK virus
VPLAFWELPLDTLLF

SEQ ID NO: 39986 - protein, 15 aa, BK virus
PLAFWELPLDTLLFF

SEQ ID NO: 39987 - protein, 15 aa, BK virus
LAFWELPLDTLLFFW

SEQ ID NO: 39988 - protein, 15 aa, BK virus
AFWELPLDTLLFFWL

SEQ ID NO: 39989 - protein, 15 aa, BK virus
FWELPLDTLLFFWLG

SEQ ID NO: 39990 - protein, 15 aa, BK virus
WELPLDTLLFFWLGP

SEQ ID NO: 39991 - protein, 15 aa, BK virus
ELPLDTLLFFWLGPS

SEQ ID NO: 39992 - protein, 15 aa, BK virus
LPLDTLLFFWLGPSS

SEQ ID NO: 39993 - protein, 15 aa, BK virus
PLDTLLFFWLGPSSY

SEQ ID NO: 39994 - protein, 15 aa, BK virus
LDTLLFFWLGPSSYA

SEQ ID NO: 39995 - protein, 15 aa, BK virus
DTLLFFWLGPSSYAS

SEQ ID NO: 39996 - protein, 15 aa, BK virus
TLLFFWLGPSSYASR

SEQ ID NO: 39997 - protein, 15 aa, BK virus
LLFFWLGPSSYASRA

SEQ ID NO: 39998 - protein, 15 aa, BK virus
LFFWLGPSSYASRAG

SEQ ID NO: 39999 - protein, 15 aa, BK virus
FFWLGPSSYASRAGV

SEQ ID NO: 40000 - protein, 15 aa, BK virus
FWLGPSSYASRAGVT

SEQ ID NO: 40001 - protein, 15 aa, BK virus
WLGPSSYASRAGVTV

SEQ ID NO: 40002 - protein, 15 aa, BK virus
LGPSSYASRAGVTVP

SEQ ID NO: 40003 - protein, 15 aa, BK virus
GPSSYASRAGVTVPY

SEQ ID NO: 40004 - protein, 15 aa, BK virus
PSSYASRAGVTVPYR

SEQ ID NO: 40005 - protein, 15 aa, BK virus
SSYASRAGVTVPYRP

SEQ ID NO: 40006 - protein, 15 aa, BK virus
SYASRAGVTVPYRPR

SEQ ID NO: 40007 - protein, 15 aa, BK virus
YASRAGVTVPYRPRS

SEQ ID NO: 40008 - protein, 15 aa, BK virus
ASRAGVTVPYRPRSK

SEQ ID NO: 40009 - protein, 15 aa, BK virus
SRAGVTVPYRPRSKG

SEQ ID NO: 40010 - protein, 15 aa, BK virus
RAGVTVPYRPRSKGN

SEQ ID NO: 40011 - protein, 15 aa, BK virus
AGVTVPYRPRSKGNI

SEQ ID NO: 40012 - protein, 15 aa, BK virus
GVTVPYRPRSKGNIH

SEQ ID NO: 40013 - protein, 15 aa, BK virus
LAPPGAIVFSINSPE

SEQ ID NO: 40014 - protein, 15 aa, BK virus
APPGAIVFSINSPEC

SEQ ID NO: 40015 - protein, 15 aa, BK virus
PPGAIVFSINSPECT

SEQ ID NO: 40016 - protein, 15 aa, BK virus
PGAIVFSINSPECTL

SEQ ID NO: 40017 - protein, 15 aa, BK virus
GAIVFSINSPECTLC

SEQ ID NO: 40018 - protein, 15 aa, BK virus
FLKSILCVTSSILSA

SEQ ID NO: 40019 - protein, 15 aa, BK virus
LKSILCVTSSILSAS

SEQ ID NO: 40020 - protein, 15 aa, BK virus
KSILCVTSSILSASS

SEQ ID NO: 40021 - protein, 15 aa, BK virus
SILCVTSSILSASSI

SEQ ID NO: 40022 - protein, 15 aa, BK virus
ILCVTSSILSASSIL

SEQ ID NO: 40023 - protein, 15 aa, BK virus
VWPKCTRVPSLSATC

SEQ ID NO: 40024 - protein, 15 aa, BK virus
WPKCTRVPSLSATCL

SEQ ID NO: 40025 - protein, 15 aa, BK virus
PKCTRVPSLSATCLT

SEQ ID NO: 40026 - protein, 15 aa, BK virus
KCTRVPSLSATCLTI

SEQ ID NO: 40027 - protein, 15 aa, BK virus
CTRVPSLSATCLTIE

SEQ ID NO: 40028 - protein, 15 aa, BK virus
TRVPSLSATCLTIEG

SEQ ID NO: 40029 - protein, 15 aa, BK virus
RVPSLSATCLTIEGL

SEQ ID NO: 40030 - protein, 15 aa, BK virus
VPSLSATCLTIEGLI

SEQ ID NO: 40031 - protein, 15 aa, BK virus
PSLSATCLTIEGLIG

SEQ ID NO: 40032 - protein, 15 aa, BK virus
SLSATCLTIEGLIGE

SEQ ID NO: 40033 - protein, 15 aa, BK virus
LSATCLTIEGLIGER

SEQ ID NO: 40034 - protein, 15 aa, BK virus
SATCLTIEGLIGERS

SEQ ID NO: 40035 - protein, 15 aa, BK virus
ATCLTIEGLIGERSE

SEQ ID NO: 40036 - protein, 15 aa, BK virus
KFIGAFTIVQVVSSK

SEQ ID NO: 40037 - protein, 15 aa, BK virus
FIGAFTIVQVVSSKN

SEQ ID NO: 40038 - protein, 15 aa, BK virus
IGAFTIVQVVSSKNL

SEQ ID NO: 40039 - protein, 15 aa, BK virus
GAFTIVQVVSSKNLA

SEQ ID NO: 40040 - protein, 15 aa, BK virus
AFTIVQVVSSKNLAK

SEQ ID NO: 40041 - protein, 15 aa, BK virus
FTIVQVVSSKNLAKE

SEQ ID NO: 40042 - protein, 15 aa, BK virus
TIVQVVSSKNLAKES

SEQ ID NO: 40043 - protein, 15 aa, BK virus
IVQVVSSKNLAKESL

SEQ ID NO: 40044 - protein, 15 aa, BK virus
VQVVSSKNLAKESLK

SEQ ID NO: 40045 - protein, 15 aa, BK virus
QVVSSKNLAKESLKN

SEQ ID NO: 40046 - protein, 15 aa, BK virus
VVSSKNLAKESLKNL

SEQ ID NO: 40047 - protein, 15 aa, BK virus
VSSKNLAKESLKNLS

SEQ ID NO: 40048 - protein, 15 aa, BK virus
SSKNLAKESLKNLSV

SEQ ID NO: 40049 - protein, 15 aa, BK virus
SKNLAKESLKNLSVL

SEQ ID NO: 40050 - protein, 15 aa, BK virus
KNLAKESLKNLSVLL

SEQ ID NO: 40051 - protein, 15 aa, BK virus
NLAKESLKNLSVLLC

SEQ ID NO: 40052 - protein, 15 aa, BK virus
LAKESLKNLSVLLCN

SEQ ID NO: 40053 - protein, 15 aa, BK virus
AKESLKNLSVLLCNS

SEQ ID NO: 40054 - protein, 15 aa, BK virus
KESLKNLSVLLCNSC

SEQ ID NO: 40055 - protein, 15 aa, BK virus
ESLKNLSVLLCNSCE

SEQ ID NO: 40056 - protein, 15 aa, BK virus
SLKNLSVLLCNSCEV

SEQ ID NO: 40057 - protein, 15 aa, BK virus
LKNLSVLLCNSCEVI

SEQ ID NO: 40058 - protein, 15 aa, BK virus
KNLSVLLCNSCEVIE

SEQ ID NO: 40059 - protein, 15 aa, BK virus
NLSVLLCNSCEVIEG

SEQ ID NO: 40060 - protein, 15 aa, BK virus
LSVLLCNSCEVIEGI

SEQ ID NO: 40061 - protein, 15 aa, BK virus
SVLLCNSCEVIEGIS

SEQ ID NO: 40062 - protein, 15 aa, BK virus
VLLCNSCEVIEGISS

SEQ ID NO: 40063 - protein, 15 aa, BK virus
LLCNSCEVIEGISSL

SEQ ID NO: 40064 - protein, 15 aa, BK virus
LCNSCEVIEGISSLI

SEQ ID NO: 40065 - protein, 15 aa, BK virus
CNSCEVIEGISSLIT

SEQ ID NO: 40066 - protein, 15 aa, BK virus
NSCEVIEGISSLITC

SEQ ID NO: 40067 - protein, 15 aa, BK virus
SCEVIEGISSLITCH

SEQ ID NO: 40068 - protein, 15 aa, BK virus
CEVIEGISSLITCHK

SEQ ID NO: 40069 - protein, 15 aa, BK virus
EVIEGISSLITCHKA

SEQ ID NO: 40070 - protein, 15 aa, BK virus
VIEGISSLITCHKAW

SEQ ID NO: 40071 - protein, 15 aa, BK virus
IEGISSLITCHKAWE

SEQ ID NO: 40072 - protein, 15 aa, BK virus
EGISSLITCHKAWEI

SEQ ID NO: 40073 - protein, 15 aa, BK virus
GISSLITCHKAWEIV

SEQ ID NO: 40074 - protein, 15 aa, BK virus
ISSLITCHKAWEIVA

SEQ ID NO: 40075 - protein, 15 aa, BK virus
SSLITCHKAWEIVAN

SEQ ID NO: 40076 - protein, 15 aa, BK virus
SLITCHKAWEIVANK

SEQ ID NO: 40077 - protein, 15 aa, BK virus
LITCHKAWEIVANKE

SEQ ID NO: 40078 - protein, 15 aa, BK virus
ITCHKAWEIVANKEG

SEQ ID NO: 40079 - protein, 15 aa, BK virus
TCHKAWEIVANKEGP

SEQ ID NO: 40080 - protein, 15 aa, BK virus
CHKAWEIVANKEGPQ

SEQ ID NO: 40081 - protein, 15 aa, BK virus
HKAWEIVANKEGPQC

SEQ ID NO: 40082 - protein, 15 aa, BK virus
KAWEIVANKEGPQCL

SEQ ID NO: 40083 - protein, 15 aa, BK virus
AWEIVANKEGPQCLG

SEQ ID NO: 40084 - protein, 15 aa, BK virus
WEIVANKEGPQCLGS

SEQ ID NO: 40085 - protein, 15 aa, BK virus
EIVANKEGPQCLGSR

SEQ ID NO: 40086 - protein, 15 aa, BK virus
IVANKEGPQCLGSRY

SEQ ID NO: 40087 - protein, 15 aa, BK virus
IKAANPAIAPGAPAI

SEQ ID NO: 40088 - protein, 15 aa, BK virus
KAANPAIAPGAPAIT

SEQ ID NO: 40089 - protein, 15 aa, BK virus
AANPAIAPGAPAITA

SEQ ID NO: 40090 - protein, 15 aa, BK virus
ANPAIAPGAPAITAY

SEQ ID NO: 40091 - protein, 15 aa, BK virus
NPAIAPGAPAITAYV

SEQ ID NO: 40092 - protein, 15 aa, BK virus
GVRPIAAIASEVLVM

SEQ ID NO: 40093 - protein, 15 aa, BK virus
VRPIAAIASEVLVMP

SEQ ID NO: 40094 - protein, 15 aa, BK virus
RPIAAIASEVLVMPS

SEQ ID NO: 40095 - protein, 15 aa, BK virus
PIAAIASEVLVMPST

SEQ ID NO: 40096 - protein, 15 aa, BK virus
IAAIASEVLVMPSTV

SEQ ID NO: 40097 - protein, 15 aa, BK virus
AAIASEVLVMPSTVA

SEQ ID NO: 40098 - protein, 15 aa, BK virus
AIASEVLVMPSTVAR

SEQ ID NO: 40099 - protein, 15 aa, BK virus
IASEVLVMPSTVARD

SEQ ID NO: 40100 - protein, 15 aa, BK virus
ASEVLVMPSTVARDA

SEQ ID NO: 40101 - protein, 15 aa, BK virus
SEVLVMPSTVARDAI

SEQ ID NO: 40102 - protein, 15 aa, BK virus
TSIAAAASPAAISAT

SEQ ID NO: 40103 - protein, 15 aa, BK virus
SIAAAASPAAISATE

SEQ ID NO: 40104 - protein, 15 aa, BK virus
IAAAASPAAISATEN

SEQ ID NO: 40105 - protein, 15 aa, BK virus
AAAASPAAISATENP

SEQ ID NO: 40106 - protein, 15 aa, BK virus
AAASPAAISATENPV

SEQ ID NO: 40107 - protein, 15 aa, BK virus
AASPAAISATENPVA

SEQ ID NO: 40108 - protein, 15 aa, BK virus
ASPAAISATENPVAA

SEQ ID NO: 40109 - protein, 15 aa, BK virus
SPAAISATENPVAAA

SEQ ID NO: 40110 - protein, 15 aa, BK virus
PAAISATENPVAAAA

SEQ ID NO: 40111 - protein, 15 aa, BK virus
AAISATENPVAAAAS

SEQ ID NO: 40112 - protein, 15 aa, BK virus
AISATENPVAAAASD

SEQ ID NO: 40113 - protein, 15 aa, BK virus
ISATENPVAAAASDT

SEQ ID NO: 40114 - protein, 15 aa, BK virus
SATENPVAAAASDTL

SEQ ID NO: 40115 - protein, 15 aa, BK virus
ATENPVAAAASDTLA

SEQ ID NO: 40116 - protein, 15 aa, BK virus
TENPVAAAASDTLAT

SEQ ID NO: 40117 - protein, 15 aa, BK virus
ENPVAAAASDTLATR

SEQ ID NO: 40118 - protein, 15 aa, BK virus
NPVAAAASDTLATRS

SEQ ID NO: 40119 - protein, 15 aa, BK virus
PVAAAASDTLATRSP

SEQ ID NO: 40120 - protein, 15 aa, BK virus
VAAAASDTLATRSPK

SEQ ID NO: 40121 - protein, 15 aa, BK virus
AAAASDTLATRSPKS

SEQ ID NO: 40122 - protein, 15 aa, BK virus
AAASDTLATRSPKSA

SEQ ID NO: 40123 - protein, 15 aa, BK virus
AASDTLATRSPKSAR

SEQ ID NO: 40124 - protein, 15 aa, BK virus
ASDTLATRSPKSARA

SEQ ID NO: 40125 - protein, 15 aa, BK virus
SDTLATRSPKSARAA

SEQ ID NO: 40126 - protein, 15 aa, BK virus
DTLATRSPKSARAAP

SEQ ID NO: 40127 - protein, 15 aa, BK virus
TLATRSPKSARAAPM

SEQ ID NO: 40128 - protein, 15 aa, BK virus
LATRSPKSARAAPMN

SEQ ID NO: 40129 - protein, 15 aa, BK virus
ATRSPKSARAAPMNL

SEQ ID NO: 40130 - protein, 15 aa, BK virus
TRSPKSARAAPMNLE

SEQ ID NO: 40131 - protein, 15 aa, BK virus
RSPKSARAAPMNLEI

SEQ ID NO: 40132 - protein, 15 aa, BK virus
SPKSARAAPMNLEIQ

SEQ ID NO: 40133 - protein, 15 aa, BK virus
PKSARAAPMNLEIQK

SEQ ID NO: 40134 - protein, 15 aa, BK virus
KSARAAPMNLEIQKK

SEQ ID NO: 40135 - protein, 15 aa, BK virus
SARAAPMNLEIQKKR

SEQ ID NO: 40136 - protein, 15 aa, BK virus
ARAAPMNLEIQKKRD

SEQ ID NO: 40137 - protein, 15 aa, BK virus
RAAPMNLEIQKKRDY

SEQ ID NO: 40138 - protein, 15 aa, BK virus
AAPMNLEIQKKRDYL

SEQ ID NO: 40139 - protein, 15 aa, BK virus
APMNLEIQKKRDYLP

SEQ ID NO: 40140 - protein, 15 aa, BK virus
PMNLEIQKKRDYLPR

SEQ ID NO: 40141 - protein, 15 aa, BK virus
MNLEIQKKRDYLPRS

SEQ ID NO: 40142 - protein, 15 aa, BK virus
NLEIQKKRDYLPRSL

SEQ ID NO: 40143 - protein, 15 aa, BK virus
LEIQKKRDYLPRSLL

SEQ ID NO: 40144 - protein, 15 aa, BK virus
EIQKKRDYLPRSLLQ

SEQ ID NO: 40145 - protein, 15 aa, BK virus
IQKKRDYLPRSLLQS

SEQ ID NO: 40146 - protein, 15 aa, BK virus
QKKRDYLPRSLLQSL

SEQ ID NO: 40147 - protein, 15 aa, BK virus
KKRDYLPRSLLQSLL

SEQ ID NO: 40148 - protein, 15 aa, BK virus
KRDYLPRSLLQSLLQ

SEQ ID NO: 40149 - protein, 15 aa, BK virus
RDYLPRSLLQSLLQQ

SEQ ID NO: 40150 - protein, 15 aa, BK virus
DYLPRSLLQSLLQQV

SEQ ID NO: 40151 - protein, 15 aa, BK virus
YLPRSLLQSLLQQVK

SEQ ID NO: 40152 - protein, 15 aa, BK virus
LPRSLLQSLLQQVKQ

SEQ ID NO: 40153 - protein, 15 aa, BK virus
PRSLLQSLLQQVKQW

SEQ ID NO: 40154 - protein, 15 aa, BK virus
RSLLQSLLQQVKQWY

SEQ ID NO: 40155 - protein, 15 aa, BK virus
SLLQSLLQQVKQWYF

SEQ ID NO: 40156 - protein, 15 aa, BK virus
LLQSLLQQVKQWYFC

SEQ ID NO: 40157 - protein, 15 aa, BK virus
LQSLLQQVKQWYFCF

SEQ ID NO: 40158 - protein, 15 aa, BK virus
QSLLQQVKQWYFCFS

SEQ ID NO: 40159 - protein, 15 aa, BK virus
SLLQQVKQWYFCFSR

SEQ ID NO: 40160 - protein, 15 aa, BK virus
LLQQVKQWYFCFSRL

SEQ ID NO: 40161 - protein, 15 aa, BK virus
LQQVKQWYFCFSRLH

SEQ ID NO: 40162 - protein, 15 aa, BK virus
QQVKQWYFCFSRLHC

SEQ ID NO: 40163 - protein, 15 aa, BK virus
QVKQWYFCFSRLHCL

SEQ ID NO: 40164 - protein, 15 aa, BK virus
VKQWYFCFSRLHCLH

SEQ ID NO: 40165 - protein, 15 aa, BK virus
KQWYFCFSRLHCLHL

SEQ ID NO: 40166 - protein, 15 aa, BK virus
QWYFCFSRLHCLHLY

SEQ ID NO: 40167 - protein, 15 aa, BK virus
WYFCFSRLHCLHLYK

SEQ ID NO: 40168 - protein, 15 aa, BK virus
YFCFSRLHCLHLYKI

SEQ ID NO: 40169 - protein, 15 aa, BK virus
FCFSRLHCLHLYKIP

SEQ ID NO: 40170 - protein, 15 aa, BK virus
CFSRLHCLHLYKIPA

SEQ ID NO: 40171 - protein, 15 aa, BK virus
FSRLHCLHLYKIPAK

SEQ ID NO: 40172 - protein, 15 aa, BK virus
SRLHCLHLYKIPAKA

SEQ ID NO: 40173 - protein, 15 aa, BK virus
RLHCLHLYKIPAKAL

SEQ ID NO: 40174 - protein, 15 aa, BK virus
LHCLHLYKIPAKALK

SEQ ID NO: 40175 - protein, 15 aa, BK virus
KSSELFFLFQSRFYQ

SEQ ID NO: 40176 - protein, 15 aa, BK virus
SSELFFLFQSRFYQL

SEQ ID NO: 40177 - protein, 15 aa, BK virus
SELFFLFQSRFYQLS

SEQ ID NO: 40178 - protein, 15 aa, BK virus
ELFFLFQSRFYQLSL

SEQ ID NO: 40179 - protein, 15 aa, BK virus
LFFLFQSRFYQLSLK

SEQ ID NO: 40180 - protein, 15 aa, BK virus
FFLFQSRFYQLSLKL

SEQ ID NO: 40181 - protein, 15 aa, BK virus
FLFQSRFYQLSLKLV

SEQ ID NO: 40182 - protein, 15 aa, BK virus
LFQSRFYQLSLKLVV

SEQ ID NO: 40183 - protein, 15 aa, BK virus
FQSRFYQLSLKLVVT

SEQ ID NO: 40184 - protein, 15 aa, BK virus
QSRFYQLSLKLVVTA

SEQ ID NO: 40185 - protein, 15 aa, BK virus
SRFYQLSLKLVVTAG

SEQ ID NO: 40186 - protein, 15 aa, BK virus
RFYQLSLKLVVTAGA

SEQ ID NO: 40187 - protein, 15 aa, BK virus
FYQLSLKLVVTAGAE

SEQ ID NO: 40188 - protein, 15 aa, BK virus
YQLSLKLVVTAGAEP

SEQ ID NO: 40189 - protein, 15 aa, BK virus
QLSLKLVVTAGAEPW

SEQ ID NO: 40190 - protein, 15 aa, BK virus
LSLKLVVTAGAEPWP

SEQ ID NO: 40191 - protein, 15 aa, BK virus
SLKLVVTAGAEPWPL

SEQ ID NO: 40192 - protein, 15 aa, BK virus
LKLVVTAGAEPWPLS

SEQ ID NO: 40193 - protein, 15 aa, BK virus
KLVVTAGAEPWPLSS

SEQ ID NO: 40194 - protein, 15 aa, BK virus
LVVTAGAEPWPLSSL

SEQ ID NO: 40195 - protein, 15 aa, BK virus
VVTAGAEPWPLSSLT

SEQ ID NO: 40196 - protein, 15 aa, BK virus
VTAGAEPWPLSSLTG

SEQ ID NO: 40197 - protein, 15 aa, BK virus
TAGAEPWPLSSLTGD

SEQ ID NO: 40198 - protein, 15 aa, BK virus
AGAEPWPLSSLTGDK

SEQ ID NO: 40199 - protein, 15 aa, BK virus
GAEPWPLSSLTGDKA

SEQ ID NO: 40200 - protein, 15 aa, BK virus
AEPWPLSSLTGDKAK

SEQ ID NO: 40201 - protein, 15 aa, BK virus
EPWPLSSLTGDKAKI

SEQ ID NO: 40202 - protein, 15 aa, BK virus
PWPLSSLTGDKAKIP

SEQ ID NO: 40203 - protein, 15 aa, BK virus
WPLSSLTGDKAKIPR

SEQ ID NO: 40204 - protein, 15 aa, BK virus
PLSSLTGDKAKIPRL

SEQ ID NO: 40205 - protein, 15 aa, BK virus
LSSLTGDKAKIPRLA

SEQ ID NO: 40206 - protein, 15 aa, BK virus
SSLTGDKAKIPRLAK

SEQ ID NO: 40207 - protein, 15 aa, BK virus
SLTGDKAKIPRLAKH

SEQ ID NO: 40208 - protein, 15 aa, BK virus
LTGDKAKIPRLAKHV

SEQ ID NO: 40209 - protein, 15 aa, BK virus
TGDKAKIPRLAKHVC

SEQ ID NO: 40210 - protein, 15 aa, BK virus
GDKAKIPRLAKHVCH

SEQ ID NO: 40211 - protein, 15 aa, BK virus
DKAKIPRLAKHVCHA

SEQ ID NO: 40212 - protein, 15 aa, BK virus
KAKIPRLAKHVCHAL

SEQ ID NO: 40213 - protein, 15 aa, BK virus
AKIPRLAKHVCHALS

SEQ ID NO: 40214 - protein, 15 aa, BK virus
KIPRLAKHVCHALSF

SEQ ID NO: 40215 - protein, 15 aa, BK virus
IPRLAKHVCHALSFL

SEQ ID NO: 40216 - protein, 15 aa, BK virus
PRLAKHVCHALSFLR

SEQ ID NO: 40217 - protein, 15 aa, BK virus
RLAKHVCHALSFLRS

SEQ ID NO: 40218 - protein, 15 aa, BK virus
LAKHVCHALSFLRSW

SEQ ID NO: 40219 - protein, 15 aa, BK virus
AKHVCHALSFLRSWF

SEQ ID NO: 40220 - protein, 15 aa, BK virus
KHVCHALSFLRSWFG

SEQ ID NO: 40221 - protein, 15 aa, BK virus
HVCHALSFLRSWFGC

SEQ ID NO: 40222 - protein, 15 aa, BK virus
VCHALSFLRSWFGCI

SEQ ID NO: 40223 - protein, 15 aa, BK virus
CHALSFLRSWFGCIP

SEQ ID NO: 40224 - protein, 15 aa, BK virus
HALSFLRSWFGCIPW

SEQ ID NO: 40225 - protein, 15 aa, BK virus
ALSFLRSWFGCIPWV

SEQ ID NO: 40226 - protein, 15 aa, BK virus
LSFLRSWFGCIPWVS

SEQ ID NO: 40227 - protein, 15 aa, BK virus
SFLRSWFGCIPWVSS

SEQ ID NO: 40228 - protein, 15 aa, BK virus
FLRSWFGCIPWVSSS

SEQ ID NO: 40229 - protein, 15 aa, BK virus
LRSWFGCIPWVSSSS

SEQ ID NO: 40230 - protein, 15 aa, BK virus
RSWFGCIPWVSSSSL

SEQ ID NO: 40231 - protein, 15 aa, BK virus
GHGLAAFPCESCTFL

SEQ ID NO: 40232 - protein, 15 aa, BK virus
HGLAAFPCESCTFLP

SEQ ID NO: 40233 - protein, 15 aa, BK virus
GLAAFPCESCTFLPE

SEQ ID NO: 40234 - protein, 15 aa, BK virus
LAAFPCESCTFLPEV

SEQ ID NO: 40235 - protein, 15 aa, BK virus
AAFPCESCTFLPEVM

SEQ ID NO: 40236 - protein, 15 aa, BK virus
AFPCESCTFLPEVMV

SEQ ID NO: 40237 - protein, 15 aa, BK virus
FPCESCTFLPEVMVW

SEQ ID NO: 40238 - protein, 15 aa, BK virus
PCESCTFLPEVMVWL

SEQ ID NO: 40239 - protein, 15 aa, BK virus
CESCTFLPEVMVWLH

SEQ ID NO: 40240 - protein, 15 aa, BK virus
ESCTFLPEVMVWLHS

SEQ ID NO: 40241 - protein, 15 aa, BK virus
SCTFLPEVMVWLHSM

SEQ ID NO: 40242 - protein, 15 aa, BK virus
CTFLPEVMVWLHSMG

SEQ ID NO: 40243 - protein, 15 aa, BK virus
TFLPEVMVWLHSMGK

SEQ ID NO: 40244 - protein, 15 aa, BK virus
FLPEVMVWLHSMGKQ

SEQ ID NO: 40245 - protein, 15 aa, BK virus
LPEVMVWLHSMGKQL

SEQ ID NO: 40246 - protein, 15 aa, BK virus
PEVMVWLHSMGKQLL

SEQ ID NO: 40247 - protein, 15 aa, BK virus
EVMVWLHSMGKQLLP

SEQ ID NO: 40248 - protein, 15 aa, BK virus
VMVWLHSMGKQLLPV

SEQ ID NO: 40249 - protein, 15 aa, BK virus
MVWLHSMGKQLLPVA

SEQ ID NO: 40250 - protein, 15 aa, BK virus
VWLHSMGKQLLPVAF

SEQ ID NO: 40251 - protein, 15 aa, BK virus
WLHSMGKQLLPVAFF

SEQ ID NO: 40252 - protein, 15 aa, BK virus
LHSMGKQLLPVAFFF

SEQ ID NO: 40253 - protein, 15 aa, BK virus
HSMGKQLLPVAFFFI

SEQ ID NO: 40254 - protein, 15 aa, BK virus
SMGKQLLPVAFFFII

SEQ ID NO: 40255 - protein, 15 aa, BK virus
MGKQLLPVAFFFIIY

SEQ ID NO: 40256 - protein, 15 aa, BK virus
GKQLLPVAFFFIIYK

SEQ ID NO: 40257 - protein, 15 aa, BK virus
KQLLPVAFFFIIYKR

SEQ ID NO: 40258 - protein, 15 aa, BK virus
QLLPVAFFFIIYKRP

SEQ ID NO: 40259 - protein, 15 aa, BK virus
LLPVAFFFIIYKRPR

SEQ ID NO: 40260 - protein, 15 aa, BK virus
LPVAFFFIIYKRPRP

SEQ ID NO: 40261 - protein, 15 aa, BK virus
PVAFFFIIYKRPRPP

SEQ ID NO: 40262 - protein, 15 aa, BK virus
VAFFFIIYKRPRPPL

SEQ ID NO: 40263 - protein, 15 aa, BK virus
AFFFIIYKRPRPPLP

SEQ ID NO: 40264 - protein, 15 aa, BK virus
FFFIIYKRPRPPLPP

SEQ ID NO: 40265 - protein, 15 aa, BK virus
FFIIYKRPRPPLPPP

SEQ ID NO: 40266 - protein, 15 aa, BK virus
FIIYKRPRPPLPPPF

SEQ ID NO: 40267 - protein, 15 aa, BK virus
IIYKRPRPPLPPPFL

SEQ ID NO: 40268 - protein, 15 aa, BK virus
IYKRPRPPLPPPFLS

SEQ ID NO: 40269 - protein, 15 aa, BK virus
YKRPRPPLPPPFLSS

SEQ ID NO: 40270 - protein, 15 aa, BK virus
KRPRPPLPPPFLSSS

SEQ ID NO: 40271 - protein, 15 aa, BK virus
RPRPPLPPPFLSSSK

SEQ ID NO: 40272 - protein, 15 aa, BK virus
PRPPLPPPFLSSSKG

SEQ ID NO: 40273 - protein, 15 aa, BK virus
RPPLPPPFLSSSKGV

SEQ ID NO: 40274 - protein, 15 aa, BK virus
PPLPPPFLSSSKGVE

SEQ ID NO: 40275 - protein, 15 aa, BK virus
PLPPPFLSSSKGVEA

SEQ ID NO: 40276 - protein, 15 aa, BK virus
LPPPFLSSSKGVEAF

SEQ ID NO: 40277 - protein, 15 aa, BK virus
PPPFLSSSKGVEAFS

SEQ ID NO: 40278 - protein, 15 aa, BK virus
PPFLSSSKGVEAFSE

SEQ ID NO: 40279 - protein, 15 aa, BK virus
PFLSSSKGVEAFSEA

SEQ ID NO: 40280 - protein, 15 aa, BK virus
QNYLGKSLFFCNFCK

SEQ ID NO: 40281 - protein, 16 aa, BK virus
WIKFLTGKNPWSSWTF

SEQ ID NO: 40282 - protein, 16 aa, BK virus
GSVRNFTLTKGATRIK

SEQ ID NO: 40283 - protein, 16 aa, BK virus
LISLILEPGVAQRFVL

SEQ ID NO: 40284 - protein, 16 aa, BK virus
ISLILEPGVAQRFVLI

SEQ ID NO: 40285 - protein, 16 aa, BK virus
SLILEPGVAQRFVLIF

SEQ ID NO: 40286 - protein, 16 aa, BK virus
LILEPGVAQRFVLIFL

SEQ ID NO: 40287 - protein, 16 aa, BK virus
ILEPGVAQRFVLIFLF

SEQ ID NO: 40288 - protein, 16 aa, BK virus
LEPGVAQRFVLIFLFA

SEQ ID NO: 40289 - protein, 16 aa, BK virus
EPGVAQRFVLIFLFAQ

SEQ ID NO: 40290 - protein, 16 aa, BK virus
PGVAQRFVLIFLFAQI

SEQ ID NO: 40291 - protein, 16 aa, BK virus
GVAQRFVLIFLFAQIP

SEQ ID NO: 40292 - protein, 16 aa, BK virus
VAQRFVLIFLFAQIPC

SEQ ID NO: 40293 - protein, 16 aa, BK virus
AQRFVLIFLFAQIPCT

SEQ ID NO: 40294 - protein, 16 aa, BK virus
QRFVLIFLFAQIPCTA

SEQ ID NO: 40295 - protein, 16 aa, BK virus
RFVLIFLFAQIPCTAR

SEQ ID NO: 40296 - protein, 16 aa, BK virus
FVLIFLFAQIPCTARN

SEQ ID NO: 40297 - protein, 16 aa, BK virus
VLIFLFAQIPCTARNG

SEQ ID NO: 40298 - protein, 16 aa, BK virus
LIFLFAQIPCTARNGL

SEQ ID NO: 40299 - protein, 16 aa, BK virus
IFLFAQIPCTARNGLF

SEQ ID NO: 40300 - protein, 16 aa, BK virus
FLFAQIPCTARNGLFV

SEQ ID NO: 40301 - protein, 16 aa, BK virus
LFAQIPCTARNGLFVP

SEQ ID NO: 40302 - protein, 16 aa, BK virus
FAQIPCTARNGLFVPK

SEQ ID NO: 40303 - protein, 16 aa, BK virus
AQIPCTARNGLFVPKS

SEQ ID NO: 40304 - protein, 16 aa, BK virus
QIPCTARNGLFVPKSL

SEQ ID NO: 40305 - protein, 16 aa, BK virus
IPCTARNGLFVPKSLL

SEQ ID NO: 40306 - protein, 16 aa, BK virus
PCTARNGLFVPKSLLC

SEQ ID NO: 40307 - protein, 16 aa, BK virus
CTARNGLFVPKSLLCT

SEQ ID NO: 40308 - protein, 16 aa, BK virus
TARNGLFVPKSLLCTA

SEQ ID NO: 40309 - protein, 16 aa, BK virus
ARNGLFVPKSLLCTAL

SEQ ID NO: 40310 - protein, 16 aa, BK virus
RNGLFVPKSLLCTALA

SEQ ID NO: 40311 - protein, 16 aa, BK virus
NGLFVPKSLLCTALAC

SEQ ID NO: 40312 - protein, 16 aa, BK virus
GLFVPKSLLCTALACY

SEQ ID NO: 40313 - protein, 16 aa, BK virus
LFVPKSLLCTALACYV

SEQ ID NO: 40314 - protein, 16 aa, BK virus
FVPKSLLCTALACYVS

SEQ ID NO: 40315 - protein, 16 aa, BK virus
VPKSLLCTALACYVSL

SEQ ID NO: 40316 - protein, 16 aa, BK virus
PKSLLCTALACYVSLD

SEQ ID NO: 40317 - protein, 16 aa, BK virus
VIIFFIGANLWNRRVG

SEQ ID NO: 40318 - protein, 16 aa, BK virus
IIFFIGANLWNRRVGV

SEQ ID NO: 40319 - protein, 16 aa, BK virus
IFFIGANLWNRRVGVL

SEQ ID NO: 40320 - protein, 16 aa, BK virus
FFIGANLWNRRVGVLV

SEQ ID NO: 40321 - protein, 16 aa, BK virus
FIGANLWNRRVGVLVE

SEQ ID NO: 40322 - protein, 16 aa, BK virus
IGANLWNRRVGVLVEF

SEQ ID NO: 40323 - protein, 16 aa, BK virus
GANLWNRRVGVLVEFL

SEQ ID NO: 40324 - protein, 16 aa, BK virus
RSNSRFSTLNTTQKKK

SEQ ID NO: 40325 - protein, 16 aa, BK virus
SNSRFSTLNTTQKKKK

SEQ ID NO: 40326 - protein, 16 aa, BK virus
NSRFSTLNTTQKKKKG

SEQ ID NO: 40327 - protein, 16 aa, BK virus
SRFSTLNTTQKKKKGR

SEQ ID NO: 40328 - protein, 16 aa, BK virus
RFSTLNTTQKKKKGRR

SEQ ID NO: 40329 - protein, 16 aa, BK virus
FSTLNTTQKKKKGRRP

SEQ ID NO: 40330 - protein, 16 aa, BK virus
RSIPYYRRKHSRGLKG

SEQ ID NO: 40331 - protein, 16 aa, BK virus
SIPYYRRKHSRGLKGA

SEQ ID NO: 40332 - protein, 16 aa, BK virus
GCVFIIRYVFRISIQC

SEQ ID NO: 40333 - protein, 16 aa, BK virus
CVFIIRYVFRISIQCR

SEQ ID NO: 40334 - protein, 16 aa, BK virus
VFIIRYVFRISIQCRG

SEQ ID NO: 40335 - protein, 16 aa, BK virus
FIIRYVFRISIQCRGV

SEQ ID NO: 40336 - protein, 16 aa, BK virus
KKSRYPSYDQGRNANR

SEQ ID NO: 40337 - protein, 16 aa, BK virus
KSRYPSYDQGRNANRK

SEQ ID NO: 40338 - protein, 16 aa, BK virus
SRYPSYDQGRNANRKI

SEQ ID NO: 40339 - protein, 16 aa, BK virus
RYPSYDQGRNANRKIQ

SEQ ID NO: 40340 - protein, 16 aa, BK virus
YPSYDQGRNANRKIQS

SEQ ID NO: 40341 - protein, 16 aa, BK virus
PSYDQGRNANRKIQSY

SEQ ID NO: 40342 - protein, 16 aa, BK virus
SYDQGRNANRKIQSYI

SEQ ID NO: 40343 - protein, 16 aa, BK virus
YDQGRNANRKIQSYIR

SEQ ID NO: 40344 - protein, 16 aa, BK virus
NGFNIWSSWKCCTRTI

SEQ ID NO: 40345 - protein, 16 aa, BK virus
GFNIWSSWKCCTRTIY

SEQ ID NO: 40346 - protein, 16 aa, BK virus
FNIWSSWKCCTRTIYG

SEQ ID NO: 40347 - protein, 16 aa, BK virus
NIWSSWKCCTRTIYGR

SEQ ID NO: 40348 - protein, 16 aa, BK virus
IWSSWKCCTRTIYGRC

SEQ ID NO: 40349 - protein, 16 aa, BK virus
WSSWKCCTRTIYGRCC

SEQ ID NO: 40350 - protein, 16 aa, BK virus
SSWKCCTRTIYGRCCL

SEQ ID NO: 40351 - protein, 16 aa, BK virus
SWKCCTRTIYGRCCLA

SEQ ID NO: 40352 - protein, 16 aa, BK virus
WKCCTRTIYGRCCLAA

SEQ ID NO: 40353 - protein, 16 aa, BK virus
KCCTRTIYGRCCLAAL

SEQ ID NO: 40354 - protein, 16 aa, BK virus
CCTRTIYGRCCLAALF

SEQ ID NO: 40355 - protein, 16 aa, BK virus
CTRTIYGRCCLAALFA

SEQ ID NO: 40356 - protein, 16 aa, BK virus
TRTIYGRCCLAALFAT

SEQ ID NO: 40357 - protein, 16 aa, BK virus
IKGFAFRTWNKQFRQF

SEQ ID NO: 40358 - protein, 16 aa, BK virus
KGFAFRTWNKQFRQFE

SEQ ID NO: 40359 - protein, 16 aa, BK virus
GFAFRTWNKQFRQFER

SEQ ID NO: 40360 - protein, 16 aa, BK virus
FAFRTWNKQFRQFERL

SEQ ID NO: 40361 - protein, 16 aa, BK virus
AFRTWNKQFRQFERLF

SEQ ID NO: 40362 - protein, 16 aa, BK virus
FRTWNKQFRQFERLFR

SEQ ID NO: 40363 - protein, 16 aa, BK virus
RTWNKQFRQFERLFRW

SEQ ID NO: 40364 - protein, 16 aa, BK virus
TWNKQFRQFERLFRWK

SEQ ID NO: 40365 - protein, 16 aa, BK virus
WNKQFRQFERLFRWKC

SEQ ID NO: 40366 - protein, 16 aa, BK virus
GKFRKETFKQKNPNIS

SEQ ID NO: 40367 - protein, 16 aa, BK virus
KFRKETFKQKNPNIST

SEQ ID NO: 40368 - protein, 16 aa, BK virus
FRKETFKQKNPNISTR

SEQ ID NO: 40369 - protein, 16 aa, BK virus
RKETFKQKNPNISTRL

SEQ ID NO: 40370 - protein, 16 aa, BK virus
KETFKQKNPNISTRLG

SEQ ID NO: 40371 - protein, 16 aa, BK virus
ETFKQKNPNISTRLGY

SEQ ID NO: 40372 - protein, 16 aa, BK virus
TFKQKNPNISTRLGYN

SEQ ID NO: 40373 - protein, 16 aa, BK virus
FKQKNPNISTRLGYNE

SEQ ID NO: 40374 - protein, 16 aa, BK virus
AQNIFKKILTKLRVLT

SEQ ID NO: 40375 - protein, 16 aa, BK virus
KKNFTKWNDLVATANL

SEQ ID NO: 40376 - protein, 16 aa, BK virus
KNFTKWNDLVATANLV

SEQ ID NO: 40377 - protein, 16 aa, BK virus
IPITMLFPSLRYFSPC

SEQ ID NO: 40378 - protein, 16 aa, BK virus
KHLFKAFWFAIVPVCQ

SEQ ID NO: 40379 - protein, 16 aa, BK virus
HLFKAFWFAIVPVCQY

SEQ ID NO: 40380 - protein, 16 aa, BK virus
LFKAFWFAIVPVCQYI

SEQ ID NO: 40381 - protein, 16 aa, BK virus
FKAFWFAIVPVCQYIL

SEQ ID NO: 40382 - protein, 16 aa, BK virus
KAFWFAIVPVCQYILS

SEQ ID NO: 40383 - protein, 16 aa, BK virus
AFWFAIVPVCQYILSY

SEQ ID NO: 40384 - protein, 16 aa, BK virus
FWFAIVPVCQYILSYL

SEQ ID NO: 40385 - protein, 16 aa, BK virus
WFAIVPVCQYILSYLG

SEQ ID NO: 40386 - protein, 16 aa, BK virus
FAIVPVCQYILSYLGP

SEQ ID NO: 40387 - protein, 16 aa, BK virus
AIVPVCQYILSYLGPL

SEQ ID NO: 40388 - protein, 16 aa, BK virus
IVPVCQYILSYLGPLE

SEQ ID NO: 40389 - protein, 16 aa, BK virus
VPVCQYILSYLGPLEV

SEQ ID NO: 40390 - protein, 16 aa, BK virus
PVCQYILSYLGPLEVF

SEQ ID NO: 40391 - protein, 16 aa, BK virus
VCQYILSYLGPLEVFL

SEQ ID NO: 40392 - protein, 16 aa, BK virus
CQYILSYLGPLEVFLC

SEQ ID NO: 40393 - protein, 16 aa, BK virus
QYILSYLGPLEVFLCH

SEQ ID NO: 40394 - protein, 16 aa, BK virus
YILSYLGPLEVFLCHQ

SEQ ID NO: 40395 - protein, 16 aa, BK virus
ILSYLGPLEVFLCHQT

SEQ ID NO: 40396 - protein, 16 aa, BK virus
LSYLGPLEVFLCHQTP

SEQ ID NO: 40397 - protein, 16 aa, BK virus
GHLAKRKLGKDSLQIF

SEQ ID NO: 40398 - protein, 16 aa, BK virus
HLAKRKLGKDSLQIFF

SEQ ID NO: 40399 - protein, 16 aa, BK virus
LAKRKLGKDSLQIFFS

SEQ ID NO: 40400 - protein, 16 aa, BK virus
AKRKLGKDSLQIFFSG

SEQ ID NO: 40401 - protein, 16 aa, BK virus
KRKLGKDSLQIFFSGG

SEQ ID NO: 40402 - protein, 16 aa, BK virus
RKLGKDSLQIFFSGGS

SEQ ID NO: 40403 - protein, 16 aa, BK virus
TGHKYQQLKHTGYQLY

SEQ ID NO: 40404 - protein, 16 aa, BK virus
GHKYQQLKHTGYQLYK

SEQ ID NO: 40405 - protein, 16 aa, BK virus
HKYQQLKHTGYQLYKE

SEQ ID NO: 40406 - protein, 16 aa, BK virus
KYQQLKHTGYQLYKEA

SEQ ID NO: 40407 - protein, 16 aa, BK virus
YQQLKHTGYQLYKEAP

SEQ ID NO: 40408 - protein, 16 aa, BK virus
QQLKHTGYQLYKEAPH

SEQ ID NO: 40409 - protein, 16 aa, BK virus
QLKHTGYQLYKEAPHP

SEQ ID NO: 40410 - protein, 16 aa, BK virus
LKHTGYQLYKEAPHPV

SEQ ID NO: 40411 - protein, 16 aa, BK virus
KHTGYQLYKEAPHPVH

SEQ ID NO: 40412 - protein, 16 aa, BK virus
HTGYQLYKEAPHPVHL

SEQ ID NO: 40413 - protein, 16 aa, BK virus
TGYQLYKEAPHPVHLA

SEQ ID NO: 40414 - protein, 16 aa, BK virus
GYQLYKEAPHPVHLAT

SEQ ID NO: 40415 - protein, 16 aa, BK virus
YQLYKEAPHPVHLATL

SEQ ID NO: 40416 - protein, 16 aa, BK virus
QLYKEAPHPVHLATLW

SEQ ID NO: 40417 - protein, 16 aa, BK virus
HFHFYWDQVPSTQLDK

SEQ ID NO: 40418 - protein, 16 aa, BK virus
FHFYWDQVPSTQLDKH

SEQ ID NO: 40419 - protein, 16 aa, BK virus
HFYWDQVPSTQLDKHC

SEQ ID NO: 40420 - protein, 16 aa, BK virus
FYWDQVPSTQLDKHCF

SEQ ID NO: 40421 - protein, 16 aa, BK virus
YWDQVPSTQLDKHCFC

SEQ ID NO: 40422 - protein, 16 aa, BK virus
WDQVPSTQLDKHCFCP

SEQ ID NO: 40423 - protein, 16 aa, BK virus
DQVPSTQLDKHCFCPN

SEQ ID NO: 40424 - protein, 16 aa, BK virus
QVPSTQLDKHCFCPNR

SEQ ID NO: 40425 - protein, 16 aa, BK virus
VPSTQLDKHCFCPNRP

SEQ ID NO: 40426 - protein, 16 aa, BK virus
PSTQLDKHCFCPNRPY

SEQ ID NO: 40427 - protein, 16 aa, BK virus
STQLDKHCFCPNRPYG

SEQ ID NO: 40428 - protein, 16 aa, BK virus
TQLDKHCFCPNRPYGQ

SEQ ID NO: 40429 - protein, 16 aa, BK virus
QLDKHCFCPNRPYGQY

SEQ ID NO: 40430 - protein, 16 aa, BK virus
LDKHCFCPNRPYGQYS

SEQ ID NO: 40431 - protein, 16 aa, BK virus
DKHCFCPNRPYGQYSL

SEQ ID NO: 40432 - protein, 16 aa, BK virus
KHCFCPNRPYGQYSLP

SEQ ID NO: 40433 - protein, 16 aa, BK virus
HCFCPNRPYGQYSLPG

SEQ ID NO: 40434 - protein, 16 aa, BK virus
CFCPNRPYGQYSLPGT

SEQ ID NO: 40435 - protein, 16 aa, BK virus
FCPNRPYGQYSLPGTG

SEQ ID NO: 40436 - protein, 16 aa, BK virus
CPNRPYGQYSLPGTGL

SEQ ID NO: 40437 - protein, 16 aa, BK virus
PNRPYGQYSLPGTGLL

SEQ ID NO: 40438 - protein, 16 aa, BK virus
NRPYGQYSLPGTGLLG

SEQ ID NO: 40439 - protein, 16 aa, BK virus
RPYGQYSLPGTGLLGF

SEQ ID NO: 40440 - protein, 16 aa, BK virus
YHQGTLTCNSLALPAF

SEQ ID NO: 40441 - protein, 16 aa, BK virus
HQGTLTCNSLALPAFP

SEQ ID NO: 40442 - protein, 16 aa, BK virus
QGTLTCNSLALPAFPR

SEQ ID NO: 40443 - protein, 16 aa, BK virus
GTLTCNSLALPAFPRV

SEQ ID NO: 40444 - protein, 16 aa, BK virus
TLTCNSLALPAFPRVL

SEQ ID NO: 40445 - protein, 16 aa, BK virus
LTCNSLALPAFPRVLH

SEQ ID NO: 40446 - protein, 16 aa, BK virus
TCNSLALPAFPRVLHL

SEQ ID NO: 40447 - protein, 16 aa, BK virus
CNSLALPAFPRVLHLQ

SEQ ID NO: 40448 - protein, 16 aa, BK virus
NSLALPAFPRVLHLQQ

SEQ ID NO: 40449 - protein, 16 aa, BK virus
SLALPAFPRVLHLQQR

SEQ ID NO: 40450 - protein, 16 aa, BK virus
LALPAFPRVLHLQQRS

SEQ ID NO: 40451 - protein, 16 aa, BK virus
ALPAFPRVLHLQQRSG

SEQ ID NO: 40452 - protein, 16 aa, BK virus
LPAFPRVLHLQQRSGN

SEQ ID NO: 40453 - protein, 16 aa, BK virus
PAFPRVLHLQQRSGNY

SEQ ID NO: 40454 - protein, 16 aa, BK virus
AFPRVLHLQQRSGNYC

SEQ ID NO: 40455 - protein, 16 aa, BK virus
FPRVLHLQQRSGNYCL

SEQ ID NO: 40456 - protein, 16 aa, BK virus
PRVLHLQQRSGNYCLE

SEQ ID NO: 40457 - protein, 16 aa, BK virus
VFLHHAHALFVTLHEG

SEQ ID NO: 40458 - protein, 16 aa, BK virus
PLFVQLQPPTSVDFHR

SEQ ID NO: 40459 - protein, 16 aa, BK virus
LFVQLQPPTSVDFHRL

SEQ ID NO: 40460 - protein, 16 aa, BK virus
FVQLQPPTSVDFHRLG

SEQ ID NO: 40461 - protein, 16 aa, BK virus
VQLQPPTSVDFHRLGP

SEQ ID NO: 40462 - protein, 16 aa, BK virus
QLQPPTSVDFHRLGPH

SEQ ID NO: 40463 - protein, 16 aa, BK virus
LQPPTSVDFHRLGPHL

SEQ ID NO: 40464 - protein, 16 aa, BK virus
QPPTSVDFHRLGPHLN

SEQ ID NO: 40465 - protein, 16 aa, BK virus
PPTSVDFHRLGPHLNW

SEQ ID NO: 40466 - protein, 16 aa, BK virus
PTSVDFHRLGPHLNWG

SEQ ID NO: 40467 - protein, 16 aa, BK virus
TSVDFHRLGPHLNWGG

SEQ ID NO: 40468 - protein, 16 aa, BK virus
SVDFHRLGPHLNWGGE

SEQ ID NO: 40469 - protein, 16 aa, BK virus
VDFHRLGPHLNWGGEF

SEQ ID NO: 40470 - protein, 16 aa, BK virus
DFHRLGPHLNWGGEFL

SEQ ID NO: 40471 - protein, 16 aa, BK virus
FHRLGPHLNWGGEFLL

SEQ ID NO: 40472 - protein, 16 aa, BK virus
HRLGPHLNWGGEFLLC

SEQ ID NO: 40473 - protein, 16 aa, BK virus
RLGPHLNWGGEFLLCC

SEQ ID NO: 40474 - protein, 16 aa, BK virus
LGPHLNWGGEFLLCCN

SEQ ID NO: 40475 - protein, 16 aa, BK virus
GPHLNWGGEFLLCCNR

SEQ ID NO: 40476 - protein, 16 aa, BK virus
PHLNWGGEFLLCCNRE

SEQ ID NO: 40477 - protein, 16 aa, BK virus
HLNWGGEFLLCCNREA

SEQ ID NO: 40478 - protein, 16 aa, BK virus
LNWGGEFLLCCNREAF

SEQ ID NO: 40479 - protein, 16 aa, BK virus
NWGGEFLLCCNREAFF

SEQ ID NO: 40480 - protein, 16 aa, BK virus
WGGEFLLCCNREAFFS

SEQ ID NO: 40481 - protein, 16 aa, BK virus
GGEFLLCCNREAFFSL

SEQ ID NO: 40482 - protein, 16 aa, BK virus
GEFLLCCNREAFFSLG

SEQ ID NO: 40483 - protein, 16 aa, BK virus
EFLLCCNREAFFSLGY

SEQ ID NO: 40484 - protein, 16 aa, BK virus
FLLCCNREAFFSLGYH

SEQ ID NO: 40485 - protein, 16 aa, BK virus
LLCCNREAFFSLGYHC

SEQ ID NO: 40486 - protein, 16 aa, BK virus
GFHLDPPFLGLGSILP

SEQ ID NO: 40487 - protein, 16 aa, BK virus
FHLDPPFLGLGSILPL

SEQ ID NO: 40488 - protein, 16 aa, BK virus
LLELLLLLLLVVLALA

SEQ ID NO: 40489 - protein, 16 aa, BK virus
LELLLLLLLVVLALAR

SEQ ID NO: 40490 - protein, 16 aa, BK virus
ELLLLLLLVVLALARV

SEQ ID NO: 40491 - protein, 16 aa, BK virus
LLLLLLLVVLALARVP

SEQ ID NO: 40492 - protein, 16 aa, BK virus
LLLLLLVVLALARVPL

SEQ ID NO: 40493 - protein, 16 aa, BK virus
LLLLLVVLALARVPLA

SEQ ID NO: 40494 - protein, 16 aa, BK virus
LLLLVVLALARVPLAF

SEQ ID NO: 40495 - protein, 16 aa, BK virus
LLLVVLALARVPLAFW

SEQ ID NO: 40496 - protein, 16 aa, BK virus
LLVVLALARVPLAFWE

SEQ ID NO: 40497 - protein, 16 aa, BK virus
LVVLALARVPLAFWEL

SEQ ID NO: 40498 - protein, 16 aa, BK virus
VVLALARVPLAFWELP

SEQ ID NO: 40499 - protein, 16 aa, BK virus
VLALARVPLAFWELPL

SEQ ID NO: 40500 - protein, 16 aa, BK virus
LALARVPLAFWELPLD

SEQ ID NO: 40501 - protein, 16 aa, BK virus
ALARVPLAFWELPLDT

SEQ ID NO: 40502 - protein, 16 aa, BK virus
LARVPLAFWELPLDTL

SEQ ID NO: 40503 - protein, 16 aa, BK virus
ARVPLAFWELPLDTLL

SEQ ID NO: 40504 - protein, 16 aa, BK virus
RVPLAFWELPLDTLLF

SEQ ID NO: 40505 - protein, 16 aa, BK virus
VPLAFWELPLDTLLFF

SEQ ID NO: 40506 - protein, 16 aa, BK virus
PLAFWELPLDTLLFFW

SEQ ID NO: 40507 - protein, 16 aa, BK virus
LAFWELPLDTLLFFWL

SEQ ID NO: 40508 - protein, 16 aa, BK virus
AFWELPLDTLLFFWLG

SEQ ID NO: 40509 - protein, 16 aa, BK virus
FWELPLDTLLFFWLGP

SEQ ID NO: 40510 - protein, 16 aa, BK virus
WELPLDTLLFFWLGPS

SEQ ID NO: 40511 - protein, 16 aa, BK virus
ELPLDTLLFFWLGPSS

SEQ ID NO: 40512 - protein, 16 aa, BK virus
LPLDTLLFFWLGPSSY

SEQ ID NO: 40513 - protein, 16 aa, BK virus
PLDTLLFFWLGPSSYA

SEQ ID NO: 40514 - protein, 16 aa, BK virus
LDTLLFFWLGPSSYAS

SEQ ID NO: 40515 - protein, 16 aa, BK virus
DTLLFFWLGPSSYASR

SEQ ID NO: 40516 - protein, 16 aa, BK virus
TLLFFWLGPSSYASRA

SEQ ID NO: 40517 - protein, 16 aa, BK virus
LLFFWLGPSSYASRAG

SEQ ID NO: 40518 - protein, 16 aa, BK virus
LFFWLGPSSYASRAGV

SEQ ID NO: 40519 - protein, 16 aa, BK virus
FFWLGPSSYASRAGVT

SEQ ID NO: 40520 - protein, 16 aa, BK virus
FWLGPSSYASRAGVTV

SEQ ID NO: 40521 - protein, 16 aa, BK virus
WLGPSSYASRAGVTVP

SEQ ID NO: 40522 - protein, 16 aa, BK virus
LGPSSYASRAGVTVPY

SEQ ID NO: 40523 - protein, 16 aa, BK virus
GPSSYASRAGVTVPYR

SEQ ID NO: 40524 - protein, 16 aa, BK virus
PSSYASRAGVTVPYRP

SEQ ID NO: 40525 - protein, 16 aa, BK virus
SSYASRAGVTVPYRPR

SEQ ID NO: 40526 - protein, 16 aa, BK virus
SYASRAGVTVPYRPRS

SEQ ID NO: 40527 - protein, 16 aa, BK virus
YASRAGVTVPYRPRSK

SEQ ID NO: 40528 - protein, 16 aa, BK virus
ASRAGVTVPYRPRSKG

SEQ ID NO: 40529 - protein, 16 aa, BK virus
SRAGVTVPYRPRSKGN

SEQ ID NO: 40530 - protein, 16 aa, BK virus
RAGVTVPYRPRSKGNI

SEQ ID NO: 40531 - protein, 16 aa, BK virus
AGVTVPYRPRSKGNIH

SEQ ID NO: 40532 - protein, 16 aa, BK virus
LAPPGAIVFSINSPEC

SEQ ID NO: 40533 - protein, 16 aa, BK virus
APPGAIVFSINSPECT

SEQ ID NO: 40534 - protein, 16 aa, BK virus
PPGAIVFSINSPECTL

SEQ ID NO: 40535 - protein, 16 aa, BK virus
PGAIVFSINSPECTLC

SEQ ID NO: 40536 - protein, 16 aa, BK virus
FLKSILCVTSSILSAS

SEQ ID NO: 40537 - protein, 16 aa, BK virus
LKSILCVTSSILSASS

SEQ ID NO: 40538 - protein, 16 aa, BK virus
KSILCVTSSILSASSI

SEQ ID NO: 40539 - protein, 16 aa, BK virus
SILCVTSSILSASSIL

SEQ ID NO: 40540 - protein, 16 aa, BK virus
VWPKCTRVPSLSATCL

SEQ ID NO: 40541 - protein, 16 aa, BK virus
WPKCTRVPSLSATCLT

SEQ ID NO: 40542 - protein, 16 aa, BK virus
PKCTRVPSLSATCLTI

SEQ ID NO: 40543 - protein, 16 aa, BK virus
KCTRVPSLSATCLTIE

SEQ ID NO: 40544 - protein, 16 aa, BK virus
CTRVPSLSATCLTIEG

SEQ ID NO: 40545 - protein, 16 aa, BK virus
TRVPSLSATCLTIEGL

SEQ ID NO: 40546 - protein, 16 aa, BK virus
RVPSLSATCLTIEGLI

SEQ ID NO: 40547 - protein, 16 aa, BK virus
VPSLSATCLTIEGLIG

SEQ ID NO: 40548 - protein, 16 aa, BK virus
PSLSATCLTIEGLIGE

SEQ ID NO: 40549 - protein, 16 aa, BK virus
SLSATCLTIEGLIGER

SEQ ID NO: 40550 - protein, 16 aa, BK virus
LSATCLTIEGLIGERS

SEQ ID NO: 40551 - protein, 16 aa, BK virus
SATCLTIEGLIGERSE

SEQ ID NO: 40552 - protein, 16 aa, BK virus
KFIGAFTIVQVVSSKN

SEQ ID NO: 40553 - protein, 16 aa, BK virus
FIGAFTIVQVVSSKNL

SEQ ID NO: 40554 - protein, 16 aa, BK virus
IGAFTIVQVVSSKNLA

SEQ ID NO: 40555 - protein, 16 aa, BK virus
GAFTIVQVVSSKNLAK

SEQ ID NO: 40556 - protein, 16 aa, BK virus
AFTIVQVVSSKNLAKE

SEQ ID NO: 40557 - protein, 16 aa, BK virus
FTIVQVVSSKNLAKES

SEQ ID NO: 40558 - protein, 16 aa, BK virus
TIVQVVSSKNLAKESL

SEQ ID NO: 40559 - protein, 16 aa, BK virus
IVQVVSSKNLAKESLK

SEQ ID NO: 40560 - protein, 16 aa, BK virus
VQVVSSKNLAKESLKN

SEQ ID NO: 40561 - protein, 16 aa, BK virus
QVVSSKNLAKESLKNL

SEQ ID NO: 40562 - protein, 16 aa, BK virus
VVSSKNLAKESLKNLS

SEQ ID NO: 40563 - protein, 16 aa, BK virus
VSSKNLAKESLKNLSV

SEQ ID NO: 40564 - protein, 16 aa, BK virus
SSKNLAKESLKNLSVL

SEQ ID NO: 40565 - protein, 16 aa, BK virus
SKNLAKESLKNLSVLL

SEQ ID NO: 40566 - protein, 16 aa, BK virus
KNLAKESLKNLSVLLC

SEQ ID NO: 40567 - protein, 16 aa, BK virus
NLAKESLKNLSVLLCN

SEQ ID NO: 40568 - protein, 16 aa, BK virus
LAKESLKNLSVLLCNS

SEQ ID NO: 40569 - protein, 16 aa, BK virus
AKESLKNLSVLLCNSC

SEQ ID NO: 40570 - protein, 16 aa, BK virus
KESLKNLSVLLCNSCE

SEQ ID NO: 40571 - protein, 16 aa, BK virus
ESLKNLSVLLCNSCEV

SEQ ID NO: 40572 - protein, 16 aa, BK virus
SLKNLSVLLCNSCEVI

SEQ ID NO: 40573 - protein, 16 aa, BK virus
LKNLSVLLCNSCEVIE

SEQ ID NO: 40574 - protein, 16 aa, BK virus
KNLSVLLCNSCEVIEG

SEQ ID NO: 40575 - protein, 16 aa, BK virus
NLSVLLCNSCEVIEGI

SEQ ID NO: 40576 - protein, 16 aa, BK virus
LSVLLCNSCEVIEGIS

SEQ ID NO: 40577 - protein, 16 aa, BK virus
SVLLCNSCEVIEGISS

SEQ ID NO: 40578 - protein, 16 aa, BK virus
VLLCNSCEVIEGISSL

SEQ ID NO: 40579 - protein, 16 aa, BK virus
LLCNSCEVIEGISSLI

SEQ ID NO: 40580 - protein, 16 aa, BK virus
LCNSCEVIEGISSLIT

SEQ ID NO: 40581 - protein, 16 aa, BK virus
CNSCEVIEGISSLITC

SEQ ID NO: 40582 - protein, 16 aa, BK virus
NSCEVIEGISSLITCH

SEQ ID NO: 40583 - protein, 16 aa, BK virus
SCEVIEGISSLITCHK

SEQ ID NO: 40584 - protein, 16 aa, BK virus
CEVIEGISSLITCHKA

SEQ ID NO: 40585 - protein, 16 aa, BK virus
EVIEGISSLITCHKAW

SEQ ID NO: 40586 - protein, 16 aa, BK virus
VIEGISSLITCHKAWE

SEQ ID NO: 40587 - protein, 16 aa, BK virus
IEGISSLITCHKAWEI

SEQ ID NO: 40588 - protein, 16 aa, BK virus
EGISSLITCHKAWEIV

SEQ ID NO: 40589 - protein, 16 aa, BK virus
GISSLITCHKAWEIVA

SEQ ID NO: 40590 - protein, 16 aa, BK virus
ISSLITCHKAWEIVAN

SEQ ID NO: 40591 - protein, 16 aa, BK virus
SSLITCHKAWEIVANK

SEQ ID NO: 40592 - protein, 16 aa, BK virus
SLITCHKAWEIVANKE

SEQ ID NO: 40593 - protein, 16 aa, BK virus
LITCHKAWEIVANKEG

SEQ ID NO: 40594 - protein, 16 aa, BK virus
ITCHKAWEIVANKEGP

SEQ ID NO: 40595 - protein, 16 aa, BK virus
TCHKAWEIVANKEGPQ

SEQ ID NO: 40596 - protein, 16 aa, BK virus
CHKAWEIVANKEGPQC

SEQ ID NO: 40597 - protein, 16 aa, BK virus
HKAWEIVANKEGPQCL

SEQ ID NO: 40598 - protein, 16 aa, BK virus
KAWEIVANKEGPQCLG

SEQ ID NO: 40599 - protein, 16 aa, BK virus
AWEIVANKEGPQCLGS

SEQ ID NO: 40600 - protein, 16 aa, BK virus
WEIVANKEGPQCLGSR

SEQ ID NO: 40601 - protein, 16 aa, BK virus
EIVANKEGPQCLGSRY

SEQ ID NO: 40602 - protein, 16 aa, BK virus
IKAANPAIAPGAPAIT

SEQ ID NO: 40603 - protein, 16 aa, BK virus
KAANPAIAPGAPAITA

SEQ ID NO: 40604 - protein, 16 aa, BK virus
AANPAIAPGAPAITAY

SEQ ID NO: 40605 - protein, 16 aa, BK virus
ANPAIAPGAPAITAYV

SEQ ID NO: 40606 - protein, 16 aa, BK virus
GVRPIAAIASEVLVMP

SEQ ID NO: 40607 - protein, 16 aa, BK virus
VRPIAAIASEVLVMPS

SEQ ID NO: 40608 - protein, 16 aa, BK virus
RPIAAIASEVLVMPST

SEQ ID NO: 40609 - protein, 16 aa, BK virus
PIAAIASEVLVMPSTV

SEQ ID NO: 40610 - protein, 16 aa, BK virus
IAAIASEVLVMPSTVA

SEQ ID NO: 40611 - protein, 16 aa, BK virus
AAIASEVLVMPSTVAR

SEQ ID NO: 40612 - protein, 16 aa, BK virus
AIASEVLVMPSTVARD

SEQ ID NO: 40613 - protein, 16 aa, BK virus
IASEVLVMPSTVARDA

SEQ ID NO: 40614 - protein, 16 aa, BK virus
ASEVLVMPSTVARDAI

SEQ ID NO: 40615 - protein, 16 aa, BK virus
TSIAAAASPAAISATE

SEQ ID NO: 40616 - protein, 16 aa, BK virus
SIAAAASPAAISATEN

SEQ ID NO: 40617 - protein, 16 aa, BK virus
IAAAASPAAISATENP

SEQ ID NO: 40618 - protein, 16 aa, BK virus
AAAASPAAISATENPV

SEQ ID NO: 40619 - protein, 16 aa, BK virus
AAASPAAISATENPVA

SEQ ID NO: 40620 - protein, 16 aa, BK virus
AASPAAISATENPVAA

SEQ ID NO: 40621 - protein, 16 aa, BK virus
ASPAAISATENPVAAA

SEQ ID NO: 40622 - protein, 16 aa, BK virus
SPAAISATENPVAAAA

SEQ ID NO: 40623 - protein, 16 aa, BK virus
PAAISATENPVAAAAS

SEQ ID NO: 40624 - protein, 16 aa, BK virus
AAISATENPVAAAASD

SEQ ID NO: 40625 - protein, 16 aa, BK virus
AISATENPVAAAASDT

SEQ ID NO: 40626 - protein, 16 aa, BK virus
ISATENPVAAAASDTL

SEQ ID NO: 40627 - protein, 16 aa, BK virus
SATENPVAAAASDTLA

SEQ ID NO: 40628 - protein, 16 aa, BK virus
ATENPVAAAASDTLAT

SEQ ID NO: 40629 - protein, 16 aa, BK virus
TENPVAAAASDTLATR

SEQ ID NO: 40630 - protein, 16 aa, BK virus
ENPVAAAASDTLATRS

SEQ ID NO: 40631 - protein, 16 aa, BK virus
NPVAAAASDTLATRSP

SEQ ID NO: 40632 - protein, 16 aa, BK virus
PVAAAASDTLATRSPK

SEQ ID NO: 40633 - protein, 16 aa, BK virus
VAAAASDTLATRSPKS

SEQ ID NO: 40634 - protein, 16 aa, BK virus
AAAASDTLATRSPKSA

SEQ ID NO: 40635 - protein, 16 aa, BK virus
AAASDTLATRSPKSAR

SEQ ID NO: 40636 - protein, 16 aa, BK virus
AASDTLATRSPKSARA

SEQ ID NO: 40637 - protein, 16 aa, BK virus
ASDTLATRSPKSARAA

SEQ ID NO: 40638 - protein, 16 aa, BK virus
SDTLATRSPKSARAAP

SEQ ID NO: 40639 - protein, 16 aa, BK virus
DTLATRSPKSARAAPM

SEQ ID NO: 40640 - protein, 16 aa, BK virus
TLATRSPKSARAAPMN

SEQ ID NO: 40641 - protein, 16 aa, BK virus
LATRSPKSARAAPMNL

SEQ ID NO: 40642 - protein, 16 aa, BK virus
ATRSPKSARAAPMNLE

SEQ ID NO: 40643 - protein, 16 aa, BK virus
TRSPKSARAAPMNLEI

SEQ ID NO: 40644 - protein, 16 aa, BK virus
RSPKSARAAPMNLEIQ

SEQ ID NO: 40645 - protein, 16 aa, BK virus
SPKSARAAPMNLEIQK

SEQ ID NO: 40646 - protein, 16 aa, BK virus
PKSARAAPMNLEIQKK

SEQ ID NO: 40647 - protein, 16 aa, BK virus
KSARAAPMNLEIQKKR

SEQ ID NO: 40648 - protein, 16 aa, BK virus
SARAAPMNLEIQKKRD

SEQ ID NO: 40649 - protein, 16 aa, BK virus
ARAAPMNLEIQKKRDY

SEQ ID NO: 40650 - protein, 16 aa, BK virus
RAAPMNLEIQKKRDYL

SEQ ID NO: 40651 - protein, 16 aa, BK virus
AAPMNLEIQKKRDYLP

SEQ ID NO: 40652 - protein, 16 aa, BK virus
APMNLEIQKKRDYLPR

SEQ ID NO: 40653 - protein, 16 aa, BK virus
PMNLEIQKKRDYLPRS

SEQ ID NO: 40654 - protein, 16 aa, BK virus
MNLEIQKKRDYLPRSL

SEQ ID NO: 40655 - protein, 16 aa, BK virus
NLEIQKKRDYLPRSLL

SEQ ID NO: 40656 - protein, 16 aa, BK virus
LEIQKKRDYLPRSLLQ

SEQ ID NO: 40657 - protein, 16 aa, BK virus
EIQKKRDYLPRSLLQS

SEQ ID NO: 40658 - protein, 16 aa, BK virus
IQKKRDYLPRSLLQSL

SEQ ID NO: 40659 - protein, 16 aa, BK virus
QKKRDYLPRSLLQSLL

SEQ ID NO: 40660 - protein, 16 aa, BK virus
KKRDYLPRSLLQSLLQ

SEQ ID NO: 40661 - protein, 16 aa, BK virus
KRDYLPRSLLQSLLQQ

SEQ ID NO: 40662 - protein, 16 aa, BK virus
RDYLPRSLLQSLLQQV

SEQ ID NO: 40663 - protein, 16 aa, BK virus
DYLPRSLLQSLLQQVK

SEQ ID NO: 40664 - protein, 16 aa, BK virus
YLPRSLLQSLLQQVKQ

SEQ ID NO: 40665 - protein, 16 aa, BK virus
LPRSLLQSLLQQVKQW

SEQ ID NO: 40666 - protein, 16 aa, BK virus
PRSLLQSLLQQVKQWY

SEQ ID NO: 40667 - protein, 16 aa, BK virus
RSLLQSLLQQVKQWYF

SEQ ID NO: 40668 - protein, 16 aa, BK virus
SLLQSLLQQVKQWYFC

SEQ ID NO: 40669 - protein, 16 aa, BK virus
LLQSLLQQVKQWYFCF

SEQ ID NO: 40670 - protein, 16 aa, BK virus
LQSLLQQVKQWYFCFS

SEQ ID NO: 40671 - protein, 16 aa, BK virus
QSLLQQVKQWYFCFSR

SEQ ID NO: 40672 - protein, 16 aa, BK virus
SLLQQVKQWYFCFSRL

SEQ ID NO: 40673 - protein, 16 aa, BK virus
LLQQVKQWYFCFSRLH

SEQ ID NO: 40674 - protein, 16 aa, BK virus
LQQVKQWYFCFSRLHC

SEQ ID NO: 40675 - protein, 16 aa, BK virus
QQVKQWYFCFSRLHCL

SEQ ID NO: 40676 - protein, 16 aa, BK virus
QVKQWYFCFSRLHCLH

SEQ ID NO: 40677 - protein, 16 aa, BK virus
VKQWYFCFSRLHCLHL

SEQ ID NO: 40678 - protein, 16 aa, BK virus
KQWYFCFSRLHCLHLY

SEQ ID NO: 40679 - protein, 16 aa, BK virus
QWYFCFSRLHCLHLYK

SEQ ID NO: 40680 - protein, 16 aa, BK virus
WYFCFSRLHCLHLYKI

SEQ ID NO: 40681 - protein, 16 aa, BK virus
YFCFSRLHCLHLYKIP

SEQ ID NO: 40682 - protein, 16 aa, BK virus
FCFSRLHCLHLYKIPA

SEQ ID NO: 40683 - protein, 16 aa, BK virus
CFSRLHCLHLYKIPAK

SEQ ID NO: 40684 - protein, 16 aa, BK virus
FSRLHCLHLYKIPAKA

SEQ ID NO: 40685 - protein, 16 aa, BK virus
SRLHCLHLYKIPAKAL

SEQ ID NO: 40686 - protein, 16 aa, BK virus
RLHCLHLYKIPAKALK

SEQ ID NO: 40687 - protein, 16 aa, BK virus
KSSELFFLFQSRFYQL

SEQ ID NO: 40688 - protein, 16 aa, BK virus
SSELFFLFQSRFYQLS

SEQ ID NO: 40689 - protein, 16 aa, BK virus
SELFFLFQSRFYQLSL

SEQ ID NO: 40690 - protein, 16 aa, BK virus
ELFFLFQSRFYQLSLK

SEQ ID NO: 40691 - protein, 16 aa, BK virus
LFFLFQSRFYQLSLKL

SEQ ID NO: 40692 - protein, 16 aa, BK virus
FFLFQSRFYQLSLKLV

SEQ ID NO: 40693 - protein, 16 aa, BK virus
FLFQSRFYQLSLKLVV

SEQ ID NO: 40694 - protein, 16 aa, BK virus
LFQSRFYQLSLKLVVT

SEQ ID NO: 40695 - protein, 16 aa, BK virus
FQSRFYQLSLKLVVTA

SEQ ID NO: 40696 - protein, 16 aa, BK virus
QSRFYQLSLKLVVTAG

SEQ ID NO: 40697 - protein, 16 aa, BK virus
SRFYQLSLKLVVTAGA

SEQ ID NO: 40698 - protein, 16 aa, BK virus
RFYQLSLKLVVTAGAE

SEQ ID NO: 40699 - protein, 16 aa, BK virus
FYQLSLKLVVTAGAEP

SEQ ID NO: 40700 - protein, 16 aa, BK virus
YQLSLKLVVTAGAEPW

SEQ ID NO: 40701 - protein, 16 aa, BK virus
QLSLKLVVTAGAEPWP

SEQ ID NO: 40702 - protein, 16 aa, BK virus
LSLKLVVTAGAEPWPL

SEQ ID NO: 40703 - protein, 16 aa, BK virus
SLKLVVTAGAEPWPLS

SEQ ID NO: 40704 - protein, 16 aa, BK virus
LKLVVTAGAEPWPLSS

SEQ ID NO: 40705 - protein, 16 aa, BK virus
KLVVTAGAEPWPLSSL

SEQ ID NO: 40706 - protein, 16 aa, BK virus
LVVTAGAEPWPLSSLT

SEQ ID NO: 40707 - protein, 16 aa, BK virus
VVTAGAEPWPLSSLTG

SEQ ID NO: 40708 - protein, 16 aa, BK virus
VTAGAEPWPLSSLTGD

SEQ ID NO: 40709 - protein, 16 aa, BK virus
TAGAEPWPLSSLTGDK

SEQ ID NO: 40710 - protein, 16 aa, BK virus
AGAEPWPLSSLTGDKA

SEQ ID NO: 40711 - protein, 16 aa, BK virus
GAEPWPLSSLTGDKAK

SEQ ID NO: 40712 - protein, 16 aa, BK virus
AEPWPLSSLTGDKAKI

SEQ ID NO: 40713 - protein, 16 aa, BK virus
EPWPLSSLTGDKAKIP

SEQ ID NO: 40714 - protein, 16 aa, BK virus
PWPLSSLTGDKAKIPR

SEQ ID NO: 40715 - protein, 16 aa, BK virus
WPLSSLTGDKAKIPRL

SEQ ID NO: 40716 - protein, 16 aa, BK virus
PLSSLTGDKAKIPRLA

SEQ ID NO: 40717 - protein, 16 aa, BK virus
LSSLTGDKAKIPRLAK

SEQ ID NO: 40718 - protein, 16 aa, BK virus
SSLTGDKAKIPRLAKH

SEQ ID NO: 40719 - protein, 16 aa, BK virus
SLTGDKAKIPRLAKHV

SEQ ID NO: 40720 - protein, 16 aa, BK virus
LTGDKAKIPRLAKHVC

SEQ ID NO: 40721 - protein, 16 aa, BK virus
TGDKAKIPRLAKHVCH

SEQ ID NO: 40722 - protein, 16 aa, BK virus
GDKAKIPRLAKHVCHA

SEQ ID NO: 40723 - protein, 16 aa, BK virus
DKAKIPRLAKHVCHAL

SEQ ID NO: 40724 - protein, 16 aa, BK virus
KAKIPRLAKHVCHALS

SEQ ID NO: 40725 - protein, 16 aa, BK virus
AKIPRLAKHVCHALSF

SEQ ID NO: 40726 - protein, 16 aa, BK virus
KIPRLAKHVCHALSFL

SEQ ID NO: 40727 - protein, 16 aa, BK virus
IPRLAKHVCHALSFLR

SEQ ID NO: 40728 - protein, 16 aa, BK virus
PRLAKHVCHALSFLRS

SEQ ID NO: 40729 - protein, 16 aa, BK virus
RLAKHVCHALSFLRSW

SEQ ID NO: 40730 - protein, 16 aa, BK virus
LAKHVCHALSFLRSWF

SEQ ID NO: 40731 - protein, 16 aa, BK virus
AKHVCHALSFLRSWFG

SEQ ID NO: 40732 - protein, 16 aa, BK virus
KHVCHALSFLRSWFGC

SEQ ID NO: 40733 - protein, 16 aa, BK virus
HVCHALSFLRSWFGCI

SEQ ID NO: 40734 - protein, 16 aa, BK virus
VCHALSFLRSWFGCIP

SEQ ID NO: 40735 - protein, 16 aa, BK virus
CHALSFLRSWFGCIPW

SEQ ID NO: 40736 - protein, 16 aa, BK virus
HALSFLRSWFGCIPWV

SEQ ID NO: 40737 - protein, 16 aa, BK virus
ALSFLRSWFGCIPWVS

SEQ ID NO: 40738 - protein, 16 aa, BK virus
LSFLRSWFGCIPWVSS

SEQ ID NO: 40739 - protein, 16 aa, BK virus
SFLRSWFGCIPWVSSS

SEQ ID NO: 40740 - protein, 16 aa, BK virus
FLRSWFGCIPWVSSSS

SEQ ID NO: 40741 - protein, 16 aa, BK virus
LRSWFGCIPWVSSSSL

SEQ ID NO: 40742 - protein, 16 aa, BK virus
GHGLAAFPCESCTFLP

SEQ ID NO: 40743 - protein, 16 aa, BK virus
HGLAAFPCESCTFLPE

SEQ ID NO: 40744 - protein, 16 aa, BK virus
GLAAFPCESCTFLPEV

SEQ ID NO: 40745 - protein, 16 aa, BK virus
LAAFPCESCTFLPEVM

SEQ ID NO: 40746 - protein, 16 aa, BK virus
AAFPCESCTFLPEVMV

SEQ ID NO: 40747 - protein, 16 aa, BK virus
AFPCESCTFLPEVMVW

SEQ ID NO: 40748 - protein, 16 aa, BK virus
FPCESCTFLPEVMVWL

SEQ ID NO: 40749 - protein, 16 aa, BK virus
PCESCTFLPEVMVWLH

SEQ ID NO: 40750 - protein, 16 aa, BK virus
CESCTFLPEVMVWLHS

SEQ ID NO: 40751 - protein, 16 aa, BK virus
ESCTFLPEVMVWLHSM

SEQ ID NO: 40752 - protein, 16 aa, BK virus
SCTFLPEVMVWLHSMG

SEQ ID NO: 40753 - protein, 16 aa, BK virus
CTFLPEVMVWLHSMGK

SEQ ID NO: 40754 - protein, 16 aa, BK virus
TFLPEVMVWLHSMGKQ

SEQ ID NO: 40755 - protein, 16 aa, BK virus
FLPEVMVWLHSMGKQL

SEQ ID NO: 40756 - protein, 16 aa, BK virus
LPEVMVWLHSMGKQLL

SEQ ID NO: 40757 - protein, 16 aa, BK virus
PEVMVWLHSMGKQLLP

SEQ ID NO: 40758 - protein, 16 aa, BK virus
EVMVWLHSMGKQLLPV

SEQ ID NO: 40759 - protein, 16 aa, BK virus
VMVWLHSMGKQLLPVA

SEQ ID NO: 40760 - protein, 16 aa, BK virus
MVWLHSMGKQLLPVAF

SEQ ID NO: 40761 - protein, 16 aa, BK virus
VWLHSMGKQLLPVAFF

SEQ ID NO: 40762 - protein, 16 aa, BK virus
WLHSMGKQLLPVAFFF

SEQ ID NO: 40763 - protein, 16 aa, BK virus
LHSMGKQLLPVAFFFI

SEQ ID NO: 40764 - protein, 16 aa, BK virus
HSMGKQLLPVAFFFII

SEQ ID NO: 40765 - protein, 16 aa, BK virus
SMGKQLLPVAFFFIIY

SEQ ID NO: 40766 - protein, 16 aa, BK virus
MGKQLLPVAFFFIIYK

SEQ ID NO: 40767 - protein, 16 aa, BK virus
GKQLLPVAFFFIIYKR

SEQ ID NO: 40768 - protein, 16 aa, BK virus
KQLLPVAFFFIIYKRP

SEQ ID NO: 40769 - protein, 16 aa, BK virus
QLLPVAFFFIIYKRPR

SEQ ID NO: 40770 - protein, 16 aa, BK virus
LLPVAFFFIIYKRPRP

SEQ ID NO: 40771 - protein, 16 aa, BK virus
LPVAFFFIIYKRPRPP

SEQ ID NO: 40772 - protein, 16 aa, BK virus
PVAFFFIIYKRPRPPL

SEQ ID NO: 40773 - protein, 16 aa, BK virus
VAFFFIIYKRPRPPLP

SEQ ID NO: 40774 - protein, 16 aa, BK virus
AFFFIIYKRPRPPLPP

SEQ ID NO: 40775 - protein, 16 aa, BK virus
FFFIIYKRPRPPLPPP

SEQ ID NO: 40776 - protein, 16 aa, BK virus
FFIIYKRPRPPLPPPF

SEQ ID NO: 40777 - protein, 16 aa, BK virus
FIIYKRPRPPLPPPFL

SEQ ID NO: 40778 - protein, 16 aa, BK virus
IIYKRPRPPLPPPFLS

SEQ ID NO: 40779 - protein, 16 aa, BK virus
IYKRPRPPLPPPFLSS

SEQ ID NO: 40780 - protein, 16 aa, BK virus
YKRPRPPLPPPFLSSS

SEQ ID NO: 40781 - protein, 16 aa, BK virus
KRPRPPLPPPFLSSSK

SEQ ID NO: 40782 - protein, 16 aa, BK virus
RPRPPLPPPFLSSSKG

SEQ ID NO: 40783 - protein, 16 aa, BK virus
PRPPLPPPFLSSSKGV

SEQ ID NO: 40784 - protein, 16 aa, BK virus
RPPLPPPFLSSSKGVE

SEQ ID NO: 40785 - protein, 16 aa, BK virus
PPLPPPFLSSSKGVEA

SEQ ID NO: 40786 - protein, 16 aa, BK virus
PLPPPFLSSSKGVEAF

SEQ ID NO: 40787 - protein, 16 aa, BK virus
LPPPFLSSSKGVEAFS

SEQ ID NO: 40788 - protein, 16 aa, BK virus
PPPFLSSSKGVEAFSE

SEQ ID NO: 40789 - protein, 16 aa, BK virus
PPFLSSSKGVEAFSEA

SEQ ID NO: 40790 - protein, 13 aa, BK virus
QGRIHGAHGPFRP

SEQ ID NO: 40791 - protein, 13 aa, BK virus
KSCLGKSSLNEKS

SEQ ID NO: 40792 - protein, 13 aa, BK virus
SCLGKSSLNEKSL

SEQ ID NO: 40793 - protein, 13 aa, BK virus
CLGKSSLNEKSLF

SEQ ID NO: 40794 - protein, 13 aa, BK virus
LGKSSLNEKSLFK

SEQ ID NO: 40795 - protein, 13 aa, BK virus
GKSSLNEKSLFKE

SEQ ID NO: 40796 - protein, 13 aa, BK virus
KSSLNEKSLFKEV

SEQ ID NO: 40797 - protein, 13 aa, BK virus
FSSLPRYPVLQGM

SEQ ID NO: 40798 - protein, 13 aa, BK virus
SSLPRYPVLQGMA

SEQ ID NO: 40799 - protein, 13 aa, BK virus
SLPRYPVLQGMAY

SEQ ID NO: 40800 - protein, 13 aa, BK virus
LPRYPVLQGMAYL

SEQ ID NO: 40801 - protein, 13 aa, BK virus
PRYPVLQGMAYLF

SEQ ID NO: 40802 - protein, 13 aa, BK virus
RYPVLQGMAYLFQ

SEQ ID NO: 40803 - protein, 13 aa, BK virus
YPVLQGMAYLFQK

SEQ ID NO: 40804 - protein, 13 aa, BK virus
PVLQGMAYLFQKA

SEQ ID NO: 40805 - protein, 13 aa, BK virus
VLQGMAYLFQKAF

SEQ ID NO: 40806 - protein, 13 aa, BK virus
LQGMAYLFQKAFC

SEQ ID NO: 40807 - protein, 13 aa, BK virus
QGMAYLFQKAFCA

SEQ ID NO: 40808 - protein, 13 aa, BK virus
GMAYLFQKAFCAL

SEQ ID NO: 40809 - protein, 13 aa, BK virus
MAYLFQKAFCALP

SEQ ID NO: 40810 - protein, 13 aa, BK virus
AYLFQKAFCALPL

SEQ ID NO: 40811 - protein, 13 aa, BK virus
YLFQKAFCALPLH

SEQ ID NO: 40812 - protein, 13 aa, BK virus
LFQKAFCALPLHA

SEQ ID NO: 40813 - protein, 13 aa, BK virus
FQKAFCALPLHAM

SEQ ID NO: 40814 - protein, 13 aa, BK virus
QKAFCALPLHAMS

SEQ ID NO: 40815 - protein, 13 aa, BK virus
KAFCALPLHAMSA

SEQ ID NO: 40816 - protein, 13 aa, BK virus
KIFKKRALGLDRL

SEQ ID NO: 40817 - protein, 13 aa, BK virus
IFKKRALGLDRLL

SEQ ID NO: 40818 - protein, 13 aa, BK virus
FKKRALGLDRLLL

SEQ ID NO: 40819 - protein, 13 aa, BK virus
KKRALGLDRLLLH

SEQ ID NO: 40820 - protein, 13 aa, BK virus
RNSAMVGPNNWRN

SEQ ID NO: 40821 - protein, 13 aa, BK virus
NSAMVGPNNWRNS

SEQ ID NO: 40822 - protein, 13 aa, BK virus
SAMVGPNNWRNSL

SEQ ID NO: 40823 - protein, 13 aa, BK virus
AMVGPNNWRNSLQ

SEQ ID NO: 40824 - protein, 13 aa, BK virus
MVGPNNWRNSLQR

SEQ ID NO: 40825 - protein, 13 aa, BK virus
VGPNNWRNSLQRS

SEQ ID NO: 40826 - protein, 13 aa, BK virus
GPNNWRNSLQRSK

SEQ ID NO: 40827 - protein, 13 aa, BK virus
PNNWRNSLQRSKA

SEQ ID NO: 40828 - protein, 13 aa, BK virus
NNWRNSLQRSKAL

SEQ ID NO: 40829 - protein, 13 aa, BK virus
NWRNSLQRSKALR

SEQ ID NO: 40830 - protein, 13 aa, BK virus
VPTYGTEEWESWW

SEQ ID NO: 40831 - protein, 13 aa, BK virus
PTYGTEEWESWWS

SEQ ID NO: 40832 - protein, 13 aa, BK virus
TYGTEEWESWWSS

SEQ ID NO: 40833 - protein, 13 aa, BK virus
YGTEEWESWWSSF

SEQ ID NO: 40834 - protein, 13 aa, BK virus
GTEEWESWWSSFN

SEQ ID NO: 40835 - protein, 13 aa, BK virus
TEEWESWWSSFNE

SEQ ID NO: 40836 - protein, 13 aa, BK virus
EEWESWWSSFNEK

SEQ ID NO: 40837 - protein, 13 aa, BK virus
EWESWWSSFNEKW

SEQ ID NO: 40838 - protein, 13 aa, BK virus
WESWWSSFNEKWD

SEQ ID NO: 40839 - protein, 13 aa, BK virus
ESWWSSFNEKWDE

SEQ ID NO: 40840 - protein, 13 aa, BK virus
SWWSSFNEKWDED

SEQ ID NO: 40841 - protein, 13 aa, BK virus
WWSSFNEKWDEDL

SEQ ID NO: 40842 - protein, 13 aa, BK virus
WSSFNEKWDEDLF

SEQ ID NO: 40843 - protein, 13 aa, BK virus
SSFNEKWDEDLFC

SEQ ID NO: 40844 - protein, 13 aa, BK virus
SFNEKWDEDLFCH

SEQ ID NO: 40845 - protein, 13 aa, BK virus
FNEKWDEDLFCHE

SEQ ID NO: 40846 - protein, 13 aa, BK virus
NEKWDEDLFCHED

SEQ ID NO: 40847 - protein, 13 aa, BK virus
EKWDEDLFCHEDM

SEQ ID NO: 40848 - protein, 13 aa, BK virus
KWDEDLFCHEDMF

SEQ ID NO: 40849 - protein, 13 aa, BK virus
WDEDLFCHEDMFA

SEQ ID NO: 40850 - protein, 13 aa, BK virus
DEDLFCHEDMFAS

SEQ ID NO: 40851 - protein, 13 aa, BK virus
EDLFCHEDMFASD

SEQ ID NO: 40852 - protein, 13 aa, BK virus
DLFCHEDMFASDE

SEQ ID NO: 40853 - protein, 13 aa, BK virus
LFCHEDMFASDEE

SEQ ID NO: 40854 - protein, 13 aa, BK virus
FCHEDMFASDEEA

SEQ ID NO: 40855 - protein, 13 aa, BK virus
CHEDMFASDEEAT

SEQ ID NO: 40856 - protein, 13 aa, BK virus
HEDMFASDEEATA

SEQ ID NO: 40857 - protein, 13 aa, BK virus
EDMFASDEEATAD

SEQ ID NO: 40858 - protein, 13 aa, BK virus
DMFASDEEATADS

SEQ ID NO: 40859 - protein, 13 aa, BK virus
MFASDEEATADSQ

SEQ ID NO: 40860 - protein, 13 aa, BK virus
FASDEEATADSQH

SEQ ID NO: 40861 - protein, 13 aa, BK virus
ASDEEATADSQHS

SEQ ID NO: 40862 - protein, 13 aa, BK virus
SDEEATADSQHST

SEQ ID NO: 40863 - protein, 13 aa, BK virus
DEEATADSQHSTP

SEQ ID NO: 40864 - protein, 13 aa, BK virus
EEATADSQHSTPP

SEQ ID NO: 40865 - protein, 13 aa, BK virus
EATADSQHSTPPK

SEQ ID NO: 40866 - protein, 13 aa, BK virus
ATADSQHSTPPKK

SEQ ID NO: 40867 - protein, 13 aa, BK virus
TADSQHSTPPKKK

SEQ ID NO: 40868 - protein, 13 aa, BK virus
ADSQHSTPPKKKR

SEQ ID NO: 40869 - protein, 13 aa, BK virus
DSQHSTPPKKKRK

SEQ ID NO: 40870 - protein, 13 aa, BK virus
SQHSTPPKKKRKV

SEQ ID NO: 40871 - protein, 13 aa, BK virus
QHSTPPKKKRKVE

SEQ ID NO: 40872 - protein, 13 aa, BK virus
HSTPPKKKRKVED

SEQ ID NO: 40873 - protein, 13 aa, BK virus
STPPKKKRKVEDP

SEQ ID NO: 40874 - protein, 13 aa, BK virus
TPPKKKRKVEDPK

SEQ ID NO: 40875 - protein, 13 aa, BK virus
PPKKKRKVEDPKD

SEQ ID NO: 40876 - protein, 13 aa, BK virus
PKKKRKVEDPKDF

SEQ ID NO: 40877 - protein, 13 aa, BK virus
KKKRKVEDPKDFP

SEQ ID NO: 40878 - protein, 13 aa, BK virus
KKRKVEDPKDFPS

SEQ ID NO: 40879 - protein, 13 aa, BK virus
KRKVEDPKDFPSD

SEQ ID NO: 40880 - protein, 13 aa, BK virus
RKVEDPKDFPSDL

SEQ ID NO: 40881 - protein, 13 aa, BK virus
KVEDPKDFPSDLH

SEQ ID NO: 40882 - protein, 13 aa, BK virus
VEDPKDFPSDLHQ

SEQ ID NO: 40883 - protein, 13 aa, BK virus
EDPKDFPSDLHQF

SEQ ID NO: 40884 - protein, 13 aa, BK virus
DPKDFPSDLHQFL

SEQ ID NO: 40885 - protein, 13 aa, BK virus
PKDFPSDLHQFLS

SEQ ID NO: 40886 - protein, 13 aa, BK virus
KDFPSDLHQFLSQ

SEQ ID NO: 40887 - protein, 13 aa, BK virus
DFPSDLHQFLSQA

SEQ ID NO: 40888 - protein, 13 aa, BK virus
FPSDLHQFLSQAV

SEQ ID NO: 40889 - protein, 13 aa, BK virus
PSDLHQFLSQAVF

SEQ ID NO: 40890 - protein, 13 aa, BK virus
SDLHQFLSQAVFS

SEQ ID NO: 40891 - protein, 13 aa, BK virus
DLHQFLSQAVFSN

SEQ ID NO: 40892 - protein, 13 aa, BK virus
LHQFLSQAVFSNR

SEQ ID NO: 40893 - protein, 13 aa, BK virus
HQFLSQAVFSNRT

SEQ ID NO: 40894 - protein, 13 aa, BK virus
QFLSQAVFSNRTL

SEQ ID NO: 40895 - protein, 13 aa, BK virus
FLSQAVFSNRTLA

SEQ ID NO: 40896 - protein, 13 aa, BK virus
LSQAVFSNRTLAC

SEQ ID NO: 40897 - protein, 13 aa, BK virus
SQAVFSNRTLACF

SEQ ID NO: 40898 - protein, 13 aa, BK virus
QAVFSNRTLACFA

SEQ ID NO: 40899 - protein, 13 aa, BK virus
AVFSNRTLACFAV

SEQ ID NO: 40900 - protein, 13 aa, BK virus
VFSNRTLACFAVY

SEQ ID NO: 40901 - protein, 13 aa, BK virus
FSNRTLACFAVYT

SEQ ID NO: 40902 - protein, 13 aa, BK virus
SNRTLACFAVYTT

SEQ ID NO: 40903 - protein, 13 aa, BK virus
NRTLACFAVYTTK

SEQ ID NO: 40904 - protein, 13 aa, BK virus
RTLACFAVYTTKE

SEQ ID NO: 40905 - protein, 13 aa, BK virus
TLACFAVYTTKEK

SEQ ID NO: 40906 - protein, 13 aa, BK virus
LACFAVYTTKEKA

SEQ ID NO: 40907 - protein, 13 aa, BK virus
ACFAVYTTKEKAQ

SEQ ID NO: 40908 - protein, 13 aa, BK virus
CFAVYTTKEKAQI

SEQ ID NO: 40909 - protein, 13 aa, BK virus
FAVYTTKEKAQIL

SEQ ID NO: 40910 - protein, 13 aa, BK virus
AVYTTKEKAQILY

SEQ ID NO: 40911 - protein, 13 aa, BK virus
VYTTKEKAQILYK

SEQ ID NO: 40912 - protein, 13 aa, BK virus
YTTKEKAQILYKK

SEQ ID NO: 40913 - protein, 13 aa, BK virus
TTKEKAQILYKKL

SEQ ID NO: 40914 - protein, 13 aa, BK virus
TKEKAQILYKKLM

SEQ ID NO: 40915 - protein, 13 aa, BK virus
KEKAQILYKKLME

SEQ ID NO: 40916 - protein, 13 aa, BK virus
EKAQILYKKLMEK

SEQ ID NO: 40917 - protein, 13 aa, BK virus
KAQILYKKLMEKY

SEQ ID NO: 40918 - protein, 13 aa, BK virus
AQILYKKLMEKYS

SEQ ID NO: 40919 - protein, 13 aa, BK virus
QILYKKLMEKYSV

SEQ ID NO: 40920 - protein, 13 aa, BK virus
ILYKKLMEKYSVT

SEQ ID NO: 40921 - protein, 13 aa, BK virus
LYKKLMEKYSVTF

SEQ ID NO: 40922 - protein, 13 aa, BK virus
YKKLMEKYSVTFI

SEQ ID NO: 40923 - protein, 13 aa, BK virus
KKLMEKYSVTFIS

SEQ ID NO: 40924 - protein, 13 aa, BK virus
KLMEKYSVTFISR

SEQ ID NO: 40925 - protein, 13 aa, BK virus
LMEKYSVTFISRH

SEQ ID NO: 40926 - protein, 13 aa, BK virus
MEKYSVTFISRHM

SEQ ID NO: 40927 - protein, 13 aa, BK virus
EKYSVTFISRHMC

SEQ ID NO: 40928 - protein, 13 aa, BK virus
KYSVTFISRHMCA

SEQ ID NO: 40929 - protein, 13 aa, BK virus
YSVTFISRHMCAG

SEQ ID NO: 40930 - protein, 13 aa, BK virus
SVTFISRHMCAGH

SEQ ID NO: 40931 - protein, 13 aa, BK virus
VTFISRHMCAGHN

SEQ ID NO: 40932 - protein, 13 aa, BK virus
TFISRHMCAGHNI

SEQ ID NO: 40933 - protein, 13 aa, BK virus
FISRHMCAGHNII

SEQ ID NO: 40934 - protein, 13 aa, BK virus
ISRHMCAGHNIIF

SEQ ID NO: 40935 - protein, 13 aa, BK virus
SRHMCAGHNIIFF

SEQ ID NO: 40936 - protein, 13 aa, BK virus
RHMCAGHNIIFFL

SEQ ID NO: 40937 - protein, 13 aa, BK virus
HMCAGHNIIFFLT

SEQ ID NO: 40938 - protein, 13 aa, BK virus
MCAGHNIIFFLTP

SEQ ID NO: 40939 - protein, 13 aa, BK virus
CAGHNIIFFLTPH

SEQ ID NO: 40940 - protein, 13 aa, BK virus
AGHNIIFFLTPHR

SEQ ID NO: 40941 - protein, 13 aa, BK virus
GHNIIFFLTPHRH

SEQ ID NO: 40942 - protein, 13 aa, BK virus
HNIIFFLTPHRHR

SEQ ID NO: 40943 - protein, 13 aa, BK virus
NIIFFLTPHRHRV

SEQ ID NO: 40944 - protein, 13 aa, BK virus
IIFFLTPHRHRVS

SEQ ID NO: 40945 - protein, 13 aa, BK virus
IFFLTPHRHRVSA

SEQ ID NO: 40946 - protein, 13 aa, BK virus
FFLTPHRHRVSAI

SEQ ID NO: 40947 - protein, 13 aa, BK virus
FLTPHRHRVSAIN

SEQ ID NO: 40948 - protein, 13 aa, BK virus
LTPHRHRVSAINN

SEQ ID NO: 40949 - protein, 13 aa, BK virus
TPHRHRVSAINNF

SEQ ID NO: 40950 - protein, 13 aa, BK virus
PHRHRVSAINNFC

SEQ ID NO: 40951 - protein, 13 aa, BK virus
HRHRVSAINNFCQ

SEQ ID NO: 40952 - protein, 13 aa, BK virus
RHRVSAINNFCQK

SEQ ID NO: 40953 - protein, 13 aa, BK virus
HRVSAINNFCQKL

SEQ ID NO: 40954 - protein, 13 aa, BK virus
RVSAINNFCQKLC

SEQ ID NO: 40955 - protein, 13 aa, BK virus
VSAINNFCQKLCT

SEQ ID NO: 40956 - protein, 13 aa, BK virus
SAINNFCQKLCTF

SEQ ID NO: 40957 - protein, 13 aa, BK virus
AINNFCQKLCTFS

SEQ ID NO: 40958 - protein, 13 aa, BK virus
INNFCQKLCTFSF

SEQ ID NO: 40959 - protein, 13 aa, BK virus
NNFCQKLCTFSFL

SEQ ID NO: 40960 - protein, 13 aa, BK virus
NFCQKLCTFSFLI

SEQ ID NO: 40961 - protein, 13 aa, BK virus
FCQKLCTFSFLIC

SEQ ID NO: 40962 - protein, 13 aa, BK virus
CQKLCTFSFLICK

SEQ ID NO: 40963 - protein, 13 aa, BK virus
QKLCTFSFLICKG

SEQ ID NO: 40964 - protein, 13 aa, BK virus
KLCTFSFLICKGV

SEQ ID NO: 40965 - protein, 13 aa, BK virus
LCTFSFLICKGVN

SEQ ID NO: 40966 - protein, 13 aa, BK virus
CTFSFLICKGVNK

SEQ ID NO: 40967 - protein, 13 aa, BK virus
TFSFLICKGVNKE

SEQ ID NO: 40968 - protein, 13 aa, BK virus
FSFLICKGVNKEY

SEQ ID NO: 40969 - protein, 13 aa, BK virus
SFLICKGVNKEYL

SEQ ID NO: 40970 - protein, 13 aa, BK virus
FLICKGVNKEYLL

SEQ ID NO: 40971 - protein, 13 aa, BK virus
LICKGVNKEYLLY

SEQ ID NO: 40972 - protein, 13 aa, BK virus
ICKGVNKEYLLYS

SEQ ID NO: 40973 - protein, 13 aa, BK virus
CKGVNKEYLLYSA

SEQ ID NO: 40974 - protein, 13 aa, BK virus
KGVNKEYLLYSAL

SEQ ID NO: 40975 - protein, 13 aa, BK virus
GVNKEYLLYSALT

SEQ ID NO: 40976 - protein, 13 aa, BK virus
VNKEYLLYSALTR

SEQ ID NO: 40977 - protein, 13 aa, BK virus
NKEYLLYSALTRD

SEQ ID NO: 40978 - protein, 13 aa, BK virus
KEYLLYSALTRDP

SEQ ID NO: 40979 - protein, 13 aa, BK virus
EYLLYSALTRDPY

SEQ ID NO: 40980 - protein, 13 aa, BK virus
YLLYSALTRDPYH

SEQ ID NO: 40981 - protein, 13 aa, BK virus
LLYSALTRDPYHT

SEQ ID NO: 40982 - protein, 13 aa, BK virus
LYSALTRDPYHTI

SEQ ID NO: 40983 - protein, 13 aa, BK virus
YSALTRDPYHTIE

SEQ ID NO: 40984 - protein, 13 aa, BK virus
SALTRDPYHTIEE

SEQ ID NO: 40985 - protein, 13 aa, BK virus
ALTRDPYHTIEES

SEQ ID NO: 40986 - protein, 13 aa, BK virus
LTRDPYHTIEESI

SEQ ID NO: 40987 - protein, 13 aa, BK virus
TRDPYHTIEESIQ

SEQ ID NO: 40988 - protein, 13 aa, BK virus
RDPYHTIEESIQG

SEQ ID NO: 40989 - protein, 13 aa, BK virus
DPYHTIEESIQGG

SEQ ID NO: 40990 - protein, 13 aa, BK virus
PYHTIEESIQGGL

SEQ ID NO: 40991 - protein, 13 aa, BK virus
YHTIEESIQGGLK

SEQ ID NO: 40992 - protein, 13 aa, BK virus
HTIEESIQGGLKE

SEQ ID NO: 40993 - protein, 13 aa, BK virus
TIEESIQGGLKEH

SEQ ID NO: 40994 - protein, 13 aa, BK virus
IEESIQGGLKEHD

SEQ ID NO: 40995 - protein, 13 aa, BK virus
EESIQGGLKEHDF

SEQ ID NO: 40996 - protein, 13 aa, BK virus
ESIQGGLKEHDFS

SEQ ID NO: 40997 - protein, 13 aa, BK virus
SIQGGLKEHDFSP

SEQ ID NO: 40998 - protein, 13 aa, BK virus
IQGGLKEHDFSPE

SEQ ID NO: 40999 - protein, 13 aa, BK virus
QGGLKEHDFSPEE

SEQ ID NO: 41000 - protein, 13 aa, BK virus
GGLKEHDFSPEEP

SEQ ID NO: 41001 - protein, 13 aa, BK virus
GLKEHDFSPEEPE

SEQ ID NO: 41002 - protein, 13 aa, BK virus
LKEHDFSPEEPEE

SEQ ID NO: 41003 - protein, 13 aa, BK virus
KEHDFSPEEPEET

SEQ ID NO: 41004 - protein, 13 aa, BK virus
EHDFSPEEPEETK

SEQ ID NO: 41005 - protein, 13 aa, BK virus
HDFSPEEPEETKQ

SEQ ID NO: 41006 - protein, 13 aa, BK virus
DFSPEEPEETKQV

SEQ ID NO: 41007 - protein, 13 aa, BK virus
FSPEEPEETKQVS

SEQ ID NO: 41008 - protein, 13 aa, BK virus
SPEEPEETKQVSW

SEQ ID NO: 41009 - protein, 13 aa, BK virus
PEEPEETKQVSWK

SEQ ID NO: 41010 - protein, 13 aa, BK virus
EEPEETKQVSWKL

SEQ ID NO: 41011 - protein, 13 aa, BK virus
EPEETKQVSWKLI

SEQ ID NO: 41012 - protein, 13 aa, BK virus
PEETKQVSWKLIT

SEQ ID NO: 41013 - protein, 13 aa, BK virus
EETKQVSWKLITE

SEQ ID NO: 41014 - protein, 13 aa, BK virus
ETKQVSWKLITEY

SEQ ID NO: 41015 - protein, 13 aa, BK virus
TKQVSWKLITEYA

SEQ ID NO: 41016 - protein, 13 aa, BK virus
KQVSWKLITEYAV

SEQ ID NO: 41017 - protein, 13 aa, BK virus
QVSWKLITEYAVE

SEQ ID NO: 41018 - protein, 13 aa, BK virus
VSWKLITEYAVET

SEQ ID NO: 41019 - protein, 13 aa, BK virus
SWKLITEYAVETK

SEQ ID NO: 41020 - protein, 13 aa, BK virus
WKLITEYAVETKC

SEQ ID NO: 41021 - protein, 13 aa, BK virus
KLITEYAVETKCE

SEQ ID NO: 41022 - protein, 13 aa, BK virus
LITEYAVETKCED

SEQ ID NO: 41023 - protein, 13 aa, BK virus
ITEYAVETKCEDV

SEQ ID NO: 41024 - protein, 13 aa, BK virus
TEYAVETKCEDVF

SEQ ID NO: 41025 - protein, 13 aa, BK virus
EYAVETKCEDVFL

SEQ ID NO: 41026 - protein, 13 aa, BK virus
YAVETKCEDVFLL

SEQ ID NO: 41027 - protein, 13 aa, BK virus
AVETKCEDVFLLL

SEQ ID NO: 41028 - protein, 13 aa, BK virus
VETKCEDVFLLLG

SEQ ID NO: 41029 - protein, 13 aa, BK virus
ETKCEDVFLLLGM

SEQ ID NO: 41030 - protein, 13 aa, BK virus
TKCEDVFLLLGMY

SEQ ID NO: 41031 - protein, 13 aa, BK virus
KCEDVFLLLGMYL

SEQ ID NO: 41032 - protein, 13 aa, BK virus
CEDVFLLLGMYLE

SEQ ID NO: 41033 - protein, 13 aa, BK virus
EDVFLLLGMYLEF

SEQ ID NO: 41034 - protein, 13 aa, BK virus
DVFLLLGMYLEFQ

SEQ ID NO: 41035 - protein, 13 aa, BK virus
VFLLLGMYLEFQY

SEQ ID NO: 41036 - protein, 13 aa, BK virus
FLLLGMYLEFQYN

SEQ ID NO: 41037 - protein, 13 aa, BK virus
LLLGMYLEFQYNV

SEQ ID NO: 41038 - protein, 13 aa, BK virus
LLGMYLEFQYNVE

SEQ ID NO: 41039 - protein, 13 aa, BK virus
LGMYLEFQYNVEE

SEQ ID NO: 41040 - protein, 13 aa, BK virus
GMYLEFQYNVEEC

SEQ ID NO: 41041 - protein, 13 aa, BK virus
MYLEFQYNVEECK

SEQ ID NO: 41042 - protein, 13 aa, BK virus
YLEFQYNVEECKK

SEQ ID NO: 41043 - protein, 13 aa, BK virus
LEFQYNVEECKKC

SEQ ID NO: 41044 - protein, 13 aa, BK virus
EFQYNVEECKKCQ

SEQ ID NO: 41045 - protein, 13 aa, BK virus
FQYNVEECKKCQK

SEQ ID NO: 41046 - protein, 13 aa, BK virus
QYNVEECKKCQKK

SEQ ID NO: 41047 - protein, 13 aa, BK virus
YNVEECKKCQKKD

SEQ ID NO: 41048 - protein, 13 aa, BK virus
NVEECKKCQKKDQ

SEQ ID NO: 41049 - protein, 13 aa, BK virus
VEECKKCQKKDQP

SEQ ID NO: 41050 - protein, 13 aa, BK virus
EECKKCQKKDQPY

SEQ ID NO: 41051 - protein, 13 aa, BK virus
ECKKCQKKDQPYH

SEQ ID NO: 41052 - protein, 13 aa, BK virus
CKKCQKKDQPYHF

SEQ ID NO: 41053 - protein, 13 aa, BK virus
KKCQKKDQPYHFK

SEQ ID NO: 41054 - protein, 13 aa, BK virus
KCQKKDQPYHFKY

SEQ ID NO: 41055 - protein, 13 aa, BK virus
CQKKDQPYHFKYH

SEQ ID NO: 41056 - protein, 13 aa, BK virus
QKKDQPYHFKYHE

SEQ ID NO: 41057 - protein, 13 aa, BK virus
KKDQPYHFKYHEK

SEQ ID NO: 41058 - protein, 13 aa, BK virus
KDQPYHFKYHEKH

SEQ ID NO: 41059 - protein, 13 aa, BK virus
DQPYHFKYHEKHF

SEQ ID NO: 41060 - protein, 13 aa, BK virus
QPYHFKYHEKHFA

SEQ ID NO: 41061 - protein, 13 aa, BK virus
PYHFKYHEKHFAN

SEQ ID NO: 41062 - protein, 13 aa, BK virus
YHFKYHEKHFANA

SEQ ID NO: 41063 - protein, 13 aa, BK virus
HFKYHEKHFANAI

SEQ ID NO: 41064 - protein, 13 aa, BK virus
FKYHEKHFANAII

SEQ ID NO: 41065 - protein, 13 aa, BK virus
KYHEKHFANAIIF

SEQ ID NO: 41066 - protein, 13 aa, BK virus
YHEKHFANAIIFA

SEQ ID NO: 41067 - protein, 13 aa, BK virus
HEKHFANAIIFAE

SEQ ID NO: 41068 - protein, 13 aa, BK virus
EKHFANAIIFAES

SEQ ID NO: 41069 - protein, 13 aa, BK virus
KHFANAIIFAESK

SEQ ID NO: 41070 - protein, 13 aa, BK virus
HFANAIIFAESKN

SEQ ID NO: 41071 - protein, 13 aa, BK virus
FANAIIFAESKNQ

SEQ ID NO: 41072 - protein, 13 aa, BK virus
ANAIIFAESKNQK

SEQ ID NO: 41073 - protein, 13 aa, BK virus
NAIIFAESKNQKS

SEQ ID NO: 41074 - protein, 13 aa, BK virus
AIIFAESKNQKSI

SEQ ID NO: 41075 - protein, 13 aa, BK virus
IIFAESKNQKSIC

SEQ ID NO: 41076 - protein, 13 aa, BK virus
IFAESKNQKSICQ

SEQ ID NO: 41077 - protein, 13 aa, BK virus
FAESKNQKSICQQ

SEQ ID NO: 41078 - protein, 13 aa, BK virus
AESKNQKSICQQA

SEQ ID NO: 41079 - protein, 13 aa, BK virus
ESKNQKSICQQAV

SEQ ID NO: 41080 - protein, 13 aa, BK virus
SKNQKSICQQAVD

SEQ ID NO: 41081 - protein, 13 aa, BK virus
KNQKSICQQAVDT

SEQ ID NO: 41082 - protein, 13 aa, BK virus
NQKSICQQAVDTV

SEQ ID NO: 41083 - protein, 13 aa, BK virus
QKSICQQAVDTVL

SEQ ID NO: 41084 - protein, 13 aa, BK virus
KSICQQAVDTVLA

SEQ ID NO: 41085 - protein, 13 aa, BK virus
SICQQAVDTVLAK

SEQ ID NO: 41086 - protein, 13 aa, BK virus
ICQQAVDTVLAKK

SEQ ID NO: 41087 - protein, 13 aa, BK virus
CQQAVDTVLAKKR

SEQ ID NO: 41088 - protein, 13 aa, BK virus
QQAVDTVLAKKRV

SEQ ID NO: 41089 - protein, 13 aa, BK virus
QAVDTVLAKKRVD

SEQ ID NO: 41090 - protein, 13 aa, BK virus
AVDTVLAKKRVDT

SEQ ID NO: 41091 - protein, 13 aa, BK virus
VDTVLAKKRVDTL

SEQ ID NO: 41092 - protein, 13 aa, BK virus
DTVLAKKRVDTLH

SEQ ID NO: 41093 - protein, 13 aa, BK virus
TVLAKKRVDTLHM

SEQ ID NO: 41094 - protein, 13 aa, BK virus
VLAKKRVDTLHMT

SEQ ID NO: 41095 - protein, 13 aa, BK virus
LAKKRVDTLHMTR

SEQ ID NO: 41096 - protein, 13 aa, BK virus
AKKRVDTLHMTRE

SEQ ID NO: 41097 - protein, 13 aa, BK virus
KKRVDTLHMTREE

SEQ ID NO: 41098 - protein, 13 aa, BK virus
KRVDTLHMTREEM

SEQ ID NO: 41099 - protein, 13 aa, BK virus
RVDTLHMTREEML

SEQ ID NO: 41100 - protein, 13 aa, BK virus
VDTLHMTREEMLT

SEQ ID NO: 41101 - protein, 13 aa, BK virus
DTLHMTREEMLTE

SEQ ID NO: 41102 - protein, 13 aa, BK virus
TLHMTREEMLTER

SEQ ID NO: 41103 - protein, 13 aa, BK virus
LHMTREEMLTERF

SEQ ID NO: 41104 - protein, 13 aa, BK virus
HMTREEMLTERFN

SEQ ID NO: 41105 - protein, 13 aa, BK virus
MTREEMLTERFNH

SEQ ID NO: 41106 - protein, 13 aa, BK virus
TREEMLTERFNHI

SEQ ID NO: 41107 - protein, 13 aa, BK virus
REEMLTERFNHIL

SEQ ID NO: 41108 - protein, 13 aa, BK virus
EEMLTERFNHILD

SEQ ID NO: 41109 - protein, 13 aa, BK virus
EMLTERFNHILDK

SEQ ID NO: 41110 - protein, 13 aa, BK virus
MLTERFNHILDKM

SEQ ID NO: 41111 - protein, 13 aa, BK virus
LTERFNHILDKMD

SEQ ID NO: 41112 - protein, 13 aa, BK virus
TERFNHILDKMDL

SEQ ID NO: 41113 - protein, 13 aa, BK virus
ERFNHILDKMDLI

SEQ ID NO: 41114 - protein, 13 aa, BK virus
RFNHILDKMDLIF

SEQ ID NO: 41115 - protein, 13 aa, BK virus
FNHILDKMDLIFG

SEQ ID NO: 41116 - protein, 13 aa, BK virus
NHILDKMDLIFGA

SEQ ID NO: 41117 - protein, 13 aa, BK virus
HILDKMDLIFGAH

SEQ ID NO: 41118 - protein, 13 aa, BK virus
ILDKMDLIFGAHG

SEQ ID NO: 41119 - protein, 13 aa, BK virus
LDKMDLIFGAHGN

SEQ ID NO: 41120 - protein, 13 aa, BK virus
DKMDLIFGAHGNA

SEQ ID NO: 41121 - protein, 13 aa, BK virus
KMDLIFGAHGNAV

SEQ ID NO: 41122 - protein, 13 aa, BK virus
MDLIFGAHGNAVL

SEQ ID NO: 41123 - protein, 13 aa, BK virus
DLIFGAHGNAVLE

SEQ ID NO: 41124 - protein, 13 aa, BK virus
LIFGAHGNAVLEQ

SEQ ID NO: 41125 - protein, 13 aa, BK virus
IFGAHGNAVLEQY

SEQ ID NO: 41126 - protein, 13 aa, BK virus
FGAHGNAVLEQYM

SEQ ID NO: 41127 - protein, 13 aa, BK virus
GAHGNAVLEQYMA

SEQ ID NO: 41128 - protein, 13 aa, BK virus
AHGNAVLEQYMAG

SEQ ID NO: 41129 - protein, 13 aa, BK virus
HGNAVLEQYMAGV

SEQ ID NO: 41130 - protein, 13 aa, BK virus
GNAVLEQYMAGVA

SEQ ID NO: 41131 - protein, 13 aa, BK virus
NAVLEQYMAGVAW

SEQ ID NO: 41132 - protein, 13 aa, BK virus
AVLEQYMAGVAWL

SEQ ID NO: 41133 - protein, 13 aa, BK virus
VLEQYMAGVAWLH

SEQ ID NO: 41134 - protein, 13 aa, BK virus
LEQYMAGVAWLHC

SEQ ID NO: 41135 - protein, 13 aa, BK virus
EQYMAGVAWLHCL

SEQ ID NO: 41136 - protein, 13 aa, BK virus
QYMAGVAWLHCLL

SEQ ID NO: 41137 - protein, 13 aa, BK virus
YMAGVAWLHCLLP

SEQ ID NO: 41138 - protein, 13 aa, BK virus
MAGVAWLHCLLPK

SEQ ID NO: 41139 - protein, 13 aa, BK virus
AGVAWLHCLLPKM

SEQ ID NO: 41140 - protein, 13 aa, BK virus
GVAWLHCLLPKMD

SEQ ID NO: 41141 - protein, 13 aa, BK virus
VAWLHCLLPKMDS

SEQ ID NO: 41142 - protein, 13 aa, BK virus
AWLHCLLPKMDSV

SEQ ID NO: 41143 - protein, 13 aa, BK virus
WLHCLLPKMDSVI

SEQ ID NO: 41144 - protein, 13 aa, BK virus
LHCLLPKMDSVIF

SEQ ID NO: 41145 - protein, 13 aa, BK virus
HCLLPKMDSVIFD

SEQ ID NO: 41146 - protein, 13 aa, BK virus
CLLPKMDSVIFDF

SEQ ID NO: 41147 - protein, 13 aa, BK virus
LLPKMDSVIFDFL

SEQ ID NO: 41148 - protein, 13 aa, BK virus
LPKMDSVIFDFLH

SEQ ID NO: 41149 - protein, 13 aa, BK virus
PKMDSVIFDFLHC

SEQ ID NO: 41150 - protein, 13 aa, BK virus
KMDSVIFDFLHCI

SEQ ID NO: 41151 - protein, 13 aa, BK virus
MDSVIFDFLHCIV

SEQ ID NO: 41152 - protein, 13 aa, BK virus
DSVIFDFLHCIVF

SEQ ID NO: 41153 - protein, 13 aa, BK virus
SVIFDFLHCIVFN

SEQ ID NO: 41154 - protein, 13 aa, BK virus
VIFDFLHCIVFNV

SEQ ID NO: 41155 - protein, 13 aa, BK virus
IFDFLHCIVFNVP

SEQ ID NO: 41156 - protein, 13 aa, BK virus
FDFLHCIVFNVPK

SEQ ID NO: 41157 - protein, 13 aa, BK virus
DFLHCIVFNVPKR

SEQ ID NO: 41158 - protein, 13 aa, BK virus
FLHCIVFNVPKRR

SEQ ID NO: 41159 - protein, 13 aa, BK virus
LHCIVFNVPKRRY

SEQ ID NO: 41160 - protein, 13 aa, BK virus
HCIVFNVPKRRYW

SEQ ID NO: 41161 - protein, 13 aa, BK virus
CIVFNVPKRRYWL

SEQ ID NO: 41162 - protein, 13 aa, BK virus
IVFNVPKRRYWLF

SEQ ID NO: 41163 - protein, 13 aa, BK virus
VFNVPKRRYWLFK

SEQ ID NO: 41164 - protein, 13 aa, BK virus
FNVPKRRYWLFKG

SEQ ID NO: 41165 - protein, 13 aa, BK virus
NVPKRRYWLFKGP

SEQ ID NO: 41166 - protein, 13 aa, BK virus
VPKRRYWLFKGPI

SEQ ID NO: 41167 - protein, 13 aa, BK virus
PKRRYWLFKGPID

SEQ ID NO: 41168 - protein, 13 aa, BK virus
KRRYWLFKGPIDS

SEQ ID NO: 41169 - protein, 13 aa, BK virus
RRYWLFKGPIDSG

SEQ ID NO: 41170 - protein, 13 aa, BK virus
RYWLFKGPIDSGK

SEQ ID NO: 41171 - protein, 13 aa, BK virus
YWLFKGPIDSGKT

SEQ ID NO: 41172 - protein, 13 aa, BK virus
WLFKGPIDSGKTT

SEQ ID NO: 41173 - protein, 13 aa, BK virus
LFKGPIDSGKTTL

SEQ ID NO: 41174 - protein, 13 aa, BK virus
FKGPIDSGKTTLA

SEQ ID NO: 41175 - protein, 13 aa, BK virus
KGPIDSGKTTLAA

SEQ ID NO: 41176 - protein, 13 aa, BK virus
GPIDSGKTTLAAG

SEQ ID NO: 41177 - protein, 13 aa, BK virus
PIDSGKTTLAAGL

SEQ ID NO: 41178 - protein, 13 aa, BK virus
IDSGKTTLAAGLL

SEQ ID NO: 41179 - protein, 13 aa, BK virus
DSGKTTLAAGLLD

SEQ ID NO: 41180 - protein, 13 aa, BK virus
SGKTTLAAGLLDL

SEQ ID NO: 41181 - protein, 13 aa, BK virus
GKTTLAAGLLDLC

SEQ ID NO: 41182 - protein, 13 aa, BK virus
KTTLAAGLLDLCG

SEQ ID NO: 41183 - protein, 13 aa, BK virus
TTLAAGLLDLCGG

SEQ ID NO: 41184 - protein, 13 aa, BK virus
TLAAGLLDLCGGK

SEQ ID NO: 41185 - protein, 13 aa, BK virus
LAAGLLDLCGGKA

SEQ ID NO: 41186 - protein, 13 aa, BK virus
AAGLLDLCGGKAL

SEQ ID NO: 41187 - protein, 13 aa, BK virus
AGLLDLCGGKALN

SEQ ID NO: 41188 - protein, 13 aa, BK virus
GLLDLCGGKALNV

SEQ ID NO: 41189 - protein, 13 aa, BK virus
LLDLCGGKALNVN

SEQ ID NO: 41190 - protein, 13 aa, BK virus
LDLCGGKALNVNL

SEQ ID NO: 41191 - protein, 13 aa, BK virus
DLCGGKALNVNLP

SEQ ID NO: 41192 - protein, 13 aa, BK virus
LCGGKALNVNLPM

SEQ ID NO: 41193 - protein, 13 aa, BK virus
CGGKALNVNLPME

SEQ ID NO: 41194 - protein, 13 aa, BK virus
GGKALNVNLPMER

SEQ ID NO: 41195 - protein, 13 aa, BK virus
GKALNVNLPMERL

SEQ ID NO: 41196 - protein, 13 aa, BK virus
KALNVNLPMERLT

SEQ ID NO: 41197 - protein, 13 aa, BK virus
ALNVNLPMERLTF

SEQ ID NO: 41198 - protein, 13 aa, BK virus
LNVNLPMERLTFE

SEQ ID NO: 41199 - protein, 13 aa, BK virus
NVNLPMERLTFEL

SEQ ID NO: 41200 - protein, 13 aa, BK virus
VNLPMERLTFELG

SEQ ID NO: 41201 - protein, 13 aa, BK virus
NLPMERLTFELGV

SEQ ID NO: 41202 - protein, 13 aa, BK virus
LPMERLTFELGVA

SEQ ID NO: 41203 - protein, 13 aa, BK virus
PMERLTFELGVAI

SEQ ID NO: 41204 - protein, 13 aa, BK virus
MERLTFELGVAID

SEQ ID NO: 41205 - protein, 13 aa, BK virus
ERLTFELGVAIDQ

SEQ ID NO: 41206 - protein, 13 aa, BK virus
RLTFELGVAIDQY

SEQ ID NO: 41207 - protein, 13 aa, BK virus
LTFELGVAIDQYM

SEQ ID NO: 41208 - protein, 13 aa, BK virus
TFELGVAIDQYMV

SEQ ID NO: 41209 - protein, 13 aa, BK virus
FELGVAIDQYMVV

SEQ ID NO: 41210 - protein, 13 aa, BK virus
ELGVAIDQYMVVF

SEQ ID NO: 41211 - protein, 13 aa, BK virus
LGVAIDQYMVVFE

SEQ ID NO: 41212 - protein, 13 aa, BK virus
GVAIDQYMVVFED

SEQ ID NO: 41213 - protein, 13 aa, BK virus
VAIDQYMVVFEDV

SEQ ID NO: 41214 - protein, 13 aa, BK virus
AIDQYMVVFEDVK

SEQ ID NO: 41215 - protein, 13 aa, BK virus
IDQYMVVFEDVKG

SEQ ID NO: 41216 - protein, 13 aa, BK virus
DQYMVVFEDVKGT

SEQ ID NO: 41217 - protein, 13 aa, BK virus
QYMVVFEDVKGTG

SEQ ID NO: 41218 - protein, 13 aa, BK virus
YMVVFEDVKGTGA

SEQ ID NO: 41219 - protein, 13 aa, BK virus
MVVFEDVKGTGAE

SEQ ID NO: 41220 - protein, 13 aa, BK virus
VVFEDVKGTGAES

SEQ ID NO: 41221 - protein, 13 aa, BK virus
VFEDVKGTGAESK

SEQ ID NO: 41222 - protein, 13 aa, BK virus
FEDVKGTGAESKD

SEQ ID NO: 41223 - protein, 13 aa, BK virus
EDVKGTGAESKDL

SEQ ID NO: 41224 - protein, 13 aa, BK virus
DVKGTGAESKDLP

SEQ ID NO: 41225 - protein, 13 aa, BK virus
VKGTGAESKDLPS

SEQ ID NO: 41226 - protein, 13 aa, BK virus
KGTGAESKDLPSG

SEQ ID NO: 41227 - protein, 13 aa, BK virus
GTGAESKDLPSGH

SEQ ID NO: 41228 - protein, 13 aa, BK virus
TGAESKDLPSGHG

SEQ ID NO: 41229 - protein, 13 aa, BK virus
GAESKDLPSGHGI

SEQ ID NO: 41230 - protein, 13 aa, BK virus
AESKDLPSGHGIN

SEQ ID NO: 41231 - protein, 13 aa, BK virus
ESKDLPSGHGINN

SEQ ID NO: 41232 - protein, 13 aa, BK virus
SKDLPSGHGINNL

SEQ ID NO: 41233 - protein, 13 aa, BK virus
KDLPSGHGINNLD

SEQ ID NO: 41234 - protein, 13 aa, BK virus
DLPSGHGINNLDS

SEQ ID NO: 41235 - protein, 13 aa, BK virus
LPSGHGINNLDSL

SEQ ID NO: 41236 - protein, 13 aa, BK virus
PSGHGINNLDSLR

SEQ ID NO: 41237 - protein, 13 aa, BK virus
SGHGINNLDSLRD

SEQ ID NO: 41238 - protein, 13 aa, BK virus
GHGINNLDSLRDY

SEQ ID NO: 41239 - protein, 13 aa, BK virus
HGINNLDSLRDYL

SEQ ID NO: 41240 - protein, 13 aa, BK virus
GINNLDSLRDYLD

SEQ ID NO: 41241 - protein, 13 aa, BK virus
INNLDSLRDYLDG

SEQ ID NO: 41242 - protein, 13 aa, BK virus
NNLDSLRDYLDGS

SEQ ID NO: 41243 - protein, 13 aa, BK virus
NLDSLRDYLDGSV

SEQ ID NO: 41244 - protein, 13 aa, BK virus
LDSLRDYLDGSVK

SEQ ID NO: 41245 - protein, 13 aa, BK virus
DSLRDYLDGSVKV

SEQ ID NO: 41246 - protein, 13 aa, BK virus
SLRDYLDGSVKVN

SEQ ID NO: 41247 - protein, 13 aa, BK virus
LRDYLDGSVKVNL

SEQ ID NO: 41248 - protein, 13 aa, BK virus
RDYLDGSVKVNLE

SEQ ID NO: 41249 - protein, 13 aa, BK virus
DYLDGSVKVNLEK

SEQ ID NO: 41250 - protein, 13 aa, BK virus
YLDGSVKVNLEKK

SEQ ID NO: 41251 - protein, 13 aa, BK virus
LDGSVKVNLEKKH

SEQ ID NO: 41252 - protein, 13 aa, BK virus
DGSVKVNLEKKHL

SEQ ID NO: 41253 - protein, 13 aa, BK virus
GSVKVNLEKKHLN

SEQ ID NO: 41254 - protein, 13 aa, BK virus
SVKVNLEKKHLNK

SEQ ID NO: 41255 - protein, 13 aa, BK virus
VKVNLEKKHLNKR

SEQ ID NO: 41256 - protein, 13 aa, BK virus
KVNLEKKHLNKRT

SEQ ID NO: 41257 - protein, 13 aa, BK virus
VNLEKKHLNKRTQ

SEQ ID NO: 41258 - protein, 13 aa, BK virus
NLEKKHLNKRTQI

SEQ ID NO: 41259 - protein, 13 aa, BK virus
LEKKHLNKRTQIF

SEQ ID NO: 41260 - protein, 13 aa, BK virus
EKKHLNKRTQIFP

SEQ ID NO: 41261 - protein, 13 aa, BK virus
KKHLNKRTQIFPP

SEQ ID NO: 41262 - protein, 13 aa, BK virus
KHLNKRTQIFPPG

SEQ ID NO: 41263 - protein, 13 aa, BK virus
HLNKRTQIFPPGL

SEQ ID NO: 41264 - protein, 13 aa, BK virus
LNKRTQIFPPGLV

SEQ ID NO: 41265 - protein, 13 aa, BK virus
NKRTQIFPPGLVT

SEQ ID NO: 41266 - protein, 13 aa, BK virus
KRTQIFPPGLVTM

SEQ ID NO: 41267 - protein, 13 aa, BK virus
RTQIFPPGLVTMN

SEQ ID NO: 41268 - protein, 13 aa, BK virus
TQIFPPGLVTMNE

SEQ ID NO: 41269 - protein, 13 aa, BK virus
QIFPPGLVTMNEY

SEQ ID NO: 41270 - protein, 13 aa, BK virus
IFPPGLVTMNEYP

SEQ ID NO: 41271 - protein, 13 aa, BK virus
FPPGLVTMNEYPV

SEQ ID NO: 41272 - protein, 13 aa, BK virus
PPGLVTMNEYPVP

SEQ ID NO: 41273 - protein, 13 aa, BK virus
PGLVTMNEYPVPK

SEQ ID NO: 41274 - protein, 13 aa, BK virus
GLVTMNEYPVPKT

SEQ ID NO: 41275 - protein, 13 aa, BK virus
LVTMNEYPVPKTL

SEQ ID NO: 41276 - protein, 13 aa, BK virus
VTMNEYPVPKTLQ

SEQ ID NO: 41277 - protein, 13 aa, BK virus
TMNEYPVPKTLQA

SEQ ID NO: 41278 - protein, 13 aa, BK virus
MNEYPVPKTLQAR

SEQ ID NO: 41279 - protein, 13 aa, BK virus
NEYPVPKTLQARF

SEQ ID NO: 41280 - protein, 13 aa, BK virus
EYPVPKTLQARFV

SEQ ID NO: 41281 - protein, 13 aa, BK virus
YPVPKTLQARFVR

SEQ ID NO: 41282 - protein, 13 aa, BK virus
PVPKTLQARFVRQ

SEQ ID NO: 41283 - protein, 13 aa, BK virus
VPKTLQARFVRQI

SEQ ID NO: 41284 - protein, 13 aa, BK virus
PKTLQARFVRQID

SEQ ID NO: 41285 - protein, 13 aa, BK virus
KTLQARFVRQIDF

SEQ ID NO: 41286 - protein, 13 aa, BK virus
TLQARFVRQIDFR

SEQ ID NO: 41287 - protein, 13 aa, BK virus
LQARFVRQIDFRP

SEQ ID NO: 41288 - protein, 13 aa, BK virus
QARFVRQIDFRPK

SEQ ID NO: 41289 - protein, 13 aa, BK virus
ARFVRQIDFRPKI

SEQ ID NO: 41290 - protein, 13 aa, BK virus
RFVRQIDFRPKIY

SEQ ID NO: 41291 - protein, 13 aa, BK virus
FVRQIDFRPKIYL

SEQ ID NO: 41292 - protein, 13 aa, BK virus
VRQIDFRPKIYLR

SEQ ID NO: 41293 - protein, 13 aa, BK virus
RQIDFRPKIYLRK

SEQ ID NO: 41294 - protein, 13 aa, BK virus
QIDFRPKIYLRKS

SEQ ID NO: 41295 - protein, 13 aa, BK virus
IDFRPKIYLRKSL

SEQ ID NO: 41296 - protein, 13 aa, BK virus
DFRPKIYLRKSLQ

SEQ ID NO: 41297 - protein, 13 aa, BK virus
FRPKIYLRKSLQN

SEQ ID NO: 41298 - protein, 13 aa, BK virus
RPKIYLRKSLQNS

SEQ ID NO: 41299 - protein, 13 aa, BK virus
PKIYLRKSLQNSE

SEQ ID NO: 41300 - protein, 13 aa, BK virus
KIYLRKSLQNSEF

SEQ ID NO: 41301 - protein, 13 aa, BK virus
IYLRKSLQNSEFL

SEQ ID NO: 41302 - protein, 13 aa, BK virus
YLRKSLQNSEFLL

SEQ ID NO: 41303 - protein, 13 aa, BK virus
LRKSLQNSEFLLE

SEQ ID NO: 41304 - protein, 13 aa, BK virus
RKSLQNSEFLLEK

SEQ ID NO: 41305 - protein, 13 aa, BK virus
KSLQNSEFLLEKR

SEQ ID NO: 41306 - protein, 13 aa, BK virus
SLQNSEFLLEKRI

SEQ ID NO: 41307 - protein, 13 aa, BK virus
LQNSEFLLEKRIL

SEQ ID NO: 41308 - protein, 13 aa, BK virus
QNSEFLLEKRILQ

SEQ ID NO: 41309 - protein, 13 aa, BK virus
NSEFLLEKRILQS

SEQ ID NO: 41310 - protein, 13 aa, BK virus
SEFLLEKRILQSG

SEQ ID NO: 41311 - protein, 13 aa, BK virus
EFLLEKRILQSGM

SEQ ID NO: 41312 - protein, 13 aa, BK virus
FLLEKRILQSGMT

SEQ ID NO: 41313 - protein, 13 aa, BK virus
LLEKRILQSGMTL

SEQ ID NO: 41314 - protein, 13 aa, BK virus
LEKRILQSGMTLL

SEQ ID NO: 41315 - protein, 13 aa, BK virus
EKRILQSGMTLLL

SEQ ID NO: 41316 - protein, 13 aa, BK virus
KRILQSGMTLLLL

SEQ ID NO: 41317 - protein, 13 aa, BK virus
RILQSGMTLLLLL

SEQ ID NO: 41318 - protein, 13 aa, BK virus
ILQSGMTLLLLLI

SEQ ID NO: 41319 - protein, 13 aa, BK virus
LQSGMTLLLLLIW

SEQ ID NO: 41320 - protein, 13 aa, BK virus
QSGMTLLLLLIWF

SEQ ID NO: 41321 - protein, 13 aa, BK virus
SGMTLLLLLIWFR

SEQ ID NO: 41322 - protein, 13 aa, BK virus
GMTLLLLLIWFRP

SEQ ID NO: 41323 - protein, 13 aa, BK virus
MTLLLLLIWFRPV

SEQ ID NO: 41324 - protein, 13 aa, BK virus
TLLLLLIWFRPVA

SEQ ID NO: 41325 - protein, 13 aa, BK virus
LLLLLIWFRPVAD

SEQ ID NO: 41326 - protein, 13 aa, BK virus
LLLLIWFRPVADF

SEQ ID NO: 41327 - protein, 13 aa, BK virus
LLLIWFRPVADFA

SEQ ID NO: 41328 - protein, 13 aa, BK virus
LLIWFRPVADFAT

SEQ ID NO: 41329 - protein, 13 aa, BK virus
LIWFRPVADFATD

SEQ ID NO: 41330 - protein, 13 aa, BK virus
IWFRPVADFATDI

SEQ ID NO: 41331 - protein, 13 aa, BK virus
WFRPVADFATDIQ

SEQ ID NO: 41332 - protein, 13 aa, BK virus
FRPVADFATDIQS

SEQ ID NO: 41333 - protein, 13 aa, BK virus
RPVADFATDIQSR

SEQ ID NO: 41334 - protein, 13 aa, BK virus
PVADFATDIQSRI

SEQ ID NO: 41335 - protein, 13 aa, BK virus
VADFATDIQSRIV

SEQ ID NO: 41336 - protein, 13 aa, BK virus
ADFATDIQSRIVE

SEQ ID NO: 41337 - protein, 13 aa, BK virus
DFATDIQSRIVEW

SEQ ID NO: 41338 - protein, 13 aa, BK virus
FATDIQSRIVEWK

SEQ ID NO: 41339 - protein, 13 aa, BK virus
ATDIQSRIVEWKE

SEQ ID NO: 41340 - protein, 13 aa, BK virus
TDIQSRIVEWKER

SEQ ID NO: 41341 - protein, 13 aa, BK virus
DIQSRIVEWKERL

SEQ ID NO: 41342 - protein, 13 aa, BK virus
IQSRIVEWKERLD

SEQ ID NO: 41343 - protein, 13 aa, BK virus
QSRIVEWKERLDS

SEQ ID NO: 41344 - protein, 13 aa, BK virus
SRIVEWKERLDSE

SEQ ID NO: 41345 - protein, 13 aa, BK virus
RIVEWKERLDSEI

SEQ ID NO: 41346 - protein, 13 aa, BK virus
IVEWKERLDSEIS

SEQ ID NO: 41347 - protein, 13 aa, BK virus
VEWKERLDSEISM

SEQ ID NO: 41348 - protein, 13 aa, BK virus
EWKERLDSEISMY

SEQ ID NO: 41349 - protein, 13 aa, BK virus
WKERLDSEISMYT

SEQ ID NO: 41350 - protein, 13 aa, BK virus
KERLDSEISMYTF

SEQ ID NO: 41351 - protein, 13 aa, BK virus
ERLDSEISMYTFS

SEQ ID NO: 41352 - protein, 13 aa, BK virus
RLDSEISMYTFSR

SEQ ID NO: 41353 - protein, 13 aa, BK virus
LDSEISMYTFSRM

SEQ ID NO: 41354 - protein, 13 aa, BK virus
DSEISMYTFSRMK

SEQ ID NO: 41355 - protein, 13 aa, BK virus
SEISMYTFSRMKY

SEQ ID NO: 41356 - protein, 13 aa, BK virus
EISMYTFSRMKYN

SEQ ID NO: 41357 - protein, 13 aa, BK virus
ISMYTFSRMKYNI

SEQ ID NO: 41358 - protein, 13 aa, BK virus
SMYTFSRMKYNIC

SEQ ID NO: 41359 - protein, 13 aa, BK virus
MYTFSRMKYNICM

SEQ ID NO: 41360 - protein, 13 aa, BK virus
YTFSRMKYNICMG

SEQ ID NO: 41361 - protein, 13 aa, BK virus
TFSRMKYNICMGK

SEQ ID NO: 41362 - protein, 13 aa, BK virus
FSRMKYNICMGKC

SEQ ID NO: 41363 - protein, 13 aa, BK virus
SRMKYNICMGKCI

SEQ ID NO: 41364 - protein, 13 aa, BK virus
RMKYNICMGKCIL

SEQ ID NO: 41365 - protein, 13 aa, BK virus
MKYNICMGKCILD

SEQ ID NO: 41366 - protein, 13 aa, BK virus
KYNICMGKCILDI

SEQ ID NO: 41367 - protein, 13 aa, BK virus
YNICMGKCILDIT

SEQ ID NO: 41368 - protein, 13 aa, BK virus
NICMGKCILDITR

SEQ ID NO: 41369 - protein, 13 aa, BK virus
ICMGKCILDITRE

SEQ ID NO: 41370 - protein, 13 aa, BK virus
CMGKCILDITREE

SEQ ID NO: 41371 - protein, 13 aa, BK virus
MGKCILDITREED

SEQ ID NO: 41372 - protein, 13 aa, BK virus
GKCILDITREEDS

SEQ ID NO: 41373 - protein, 13 aa, BK virus
KCILDITREEDSE

SEQ ID NO: 41374 - protein, 13 aa, BK virus
CILDITREEDSET

SEQ ID NO: 41375 - protein, 13 aa, BK virus
ILDITREEDSETE

SEQ ID NO: 41376 - protein, 13 aa, BK virus
LDITREEDSETED

SEQ ID NO: 41377 - protein, 13 aa, BK virus
DITREEDSETEDS

SEQ ID NO: 41378 - protein, 13 aa, BK virus
ITREEDSETEDSG

SEQ ID NO: 41379 - protein, 13 aa, BK virus
TREEDSETEDSGH

SEQ ID NO: 41380 - protein, 13 aa, BK virus
REEDSETEDSGHG

SEQ ID NO: 41381 - protein, 13 aa, BK virus
EEDSETEDSGHGS

SEQ ID NO: 41382 - protein, 13 aa, BK virus
EDSETEDSGHGSS

SEQ ID NO: 41383 - protein, 13 aa, BK virus
DSETEDSGHGSST

SEQ ID NO: 41384 - protein, 13 aa, BK virus
SETEDSGHGSSTE

SEQ ID NO: 41385 - protein, 13 aa, BK virus
ETEDSGHGSSTES

SEQ ID NO: 41386 - protein, 13 aa, BK virus
TEDSGHGSSTESQ

SEQ ID NO: 41387 - protein, 13 aa, BK virus
EDSGHGSSTESQS

SEQ ID NO: 41388 - protein, 13 aa, BK virus
DSGHGSSTESQSQ

SEQ ID NO: 41389 - protein, 13 aa, BK virus
SGHGSSTESQSQC

SEQ ID NO: 41390 - protein, 13 aa, BK virus
GHGSSTESQSQCS

SEQ ID NO: 41391 - protein, 13 aa, BK virus
HGSSTESQSQCSS

SEQ ID NO: 41392 - protein, 13 aa, BK virus
GSSTESQSQCSSQ

SEQ ID NO: 41393 - protein, 13 aa, BK virus
SSTESQSQCSSQV

SEQ ID NO: 41394 - protein, 13 aa, BK virus
STESQSQCSSQVS

SEQ ID NO: 41395 - protein, 13 aa, BK virus
TESQSQCSSQVSD

SEQ ID NO: 41396 - protein, 13 aa, BK virus
ESQSQCSSQVSDT

SEQ ID NO: 41397 - protein, 13 aa, BK virus
SQSQCSSQVSDTS

SEQ ID NO: 41398 - protein, 13 aa, BK virus
QSQCSSQVSDTSA

SEQ ID NO: 41399 - protein, 13 aa, BK virus
SQCSSQVSDTSAP

SEQ ID NO: 41400 - protein, 13 aa, BK virus
QCSSQVSDTSAPA

SEQ ID NO: 41401 - protein, 13 aa, BK virus
CSSQVSDTSAPAE

SEQ ID NO: 41402 - protein, 13 aa, BK virus
SSQVSDTSAPAED

SEQ ID NO: 41403 - protein, 13 aa, BK virus
SQVSDTSAPAEDS

SEQ ID NO: 41404 - protein, 13 aa, BK virus
QVSDTSAPAEDSQ

SEQ ID NO: 41405 - protein, 13 aa, BK virus
VSDTSAPAEDSQR

SEQ ID NO: 41406 - protein, 13 aa, BK virus
SDTSAPAEDSQRS

SEQ ID NO: 41407 - protein, 13 aa, BK virus
DTSAPAEDSQRSD

SEQ ID NO: 41408 - protein, 13 aa, BK virus
TSAPAEDSQRSDP

SEQ ID NO: 41409 - protein, 13 aa, BK virus
SAPAEDSQRSDPH

SEQ ID NO: 41410 - protein, 13 aa, BK virus
APAEDSQRSDPHS

SEQ ID NO: 41411 - protein, 13 aa, BK virus
PAEDSQRSDPHSQ

SEQ ID NO: 41412 - protein, 13 aa, BK virus
AEDSQRSDPHSQE

SEQ ID NO: 41413 - protein, 13 aa, BK virus
EDSQRSDPHSQEL

SEQ ID NO: 41414 - protein, 13 aa, BK virus
DSQRSDPHSQELH

SEQ ID NO: 41415 - protein, 13 aa, BK virus
SQRSDPHSQELHL

SEQ ID NO: 41416 - protein, 13 aa, BK virus
QRSDPHSQELHLC

SEQ ID NO: 41417 - protein, 13 aa, BK virus
RSDPHSQELHLCK

SEQ ID NO: 41418 - protein, 13 aa, BK virus
SDPHSQELHLCKG

SEQ ID NO: 41419 - protein, 13 aa, BK virus
DPHSQELHLCKGF

SEQ ID NO: 41420 - protein, 13 aa, BK virus
PHSQELHLCKGFQ

SEQ ID NO: 41421 - protein, 13 aa, BK virus
HSQELHLCKGFQC

SEQ ID NO: 41422 - protein, 13 aa, BK virus
SQELHLCKGFQCF

SEQ ID NO: 41423 - protein, 13 aa, BK virus
QELHLCKGFQCFK

SEQ ID NO: 41424 - protein, 13 aa, BK virus
ELHLCKGFQCFKR

SEQ ID NO: 41425 - protein, 13 aa, BK virus
LHLCKGFQCFKRP

SEQ ID NO: 41426 - protein, 13 aa, BK virus
HLCKGFQCFKRPK

SEQ ID NO: 41427 - protein, 13 aa, BK virus
LCKGFQCFKRPKT

SEQ ID NO: 41428 - protein, 13 aa, BK virus
CKGFQCFKRPKTP

SEQ ID NO: 41429 - protein, 13 aa, BK virus
KGFQCFKRPKTPP

SEQ ID NO: 41430 - protein, 13 aa, BK virus
GFQCFKRPKTPPP

SEQ ID NO: 41431 - protein, 13 aa, BK virus
FQCFKRPKTPPPK

SEQ ID NO: 41432 - protein, 13 aa, BK virus
HKLKSGLYKSSIY

SEQ ID NO: 41433 - protein, 13 aa, BK virus
MYMYNKSTCLKHF

SEQ ID NO: 41434 - protein, 13 aa, BK virus
YMYNKSTCLKHFG

SEQ ID NO: 41435 - protein, 13 aa, BK virus
MYNKSTCLKHFGL

SEQ ID NO: 41436 - protein, 13 aa, BK virus
YNKSTCLKHFGLQ

SEQ ID NO: 41437 - protein, 13 aa, BK virus
NKSTCLKHFGLQL

SEQ ID NO: 41438 - protein, 13 aa, BK virus
KSTCLKHFGLQLS

SEQ ID NO: 41439 - protein, 13 aa, BK virus
STCLKHFGLQLSL

SEQ ID NO: 41440 - protein, 13 aa, BK virus
TCLKHFGLQLSLF

SEQ ID NO: 41441 - protein, 13 aa, BK virus
CLKHFGLQLSLFV

SEQ ID NO: 41442 - protein, 13 aa, BK virus
LKHFGLQLSLFVN

SEQ ID NO: 41443 - protein, 13 aa, BK virus
KHFGLQLSLFVNI

SEQ ID NO: 41444 - protein, 13 aa, BK virus
HFGLQLSLFVNIS

SEQ ID NO: 41445 - protein, 13 aa, BK virus
FGLQLSLFVNISY

SEQ ID NO: 41446 - protein, 13 aa, BK virus
GLQLSLFVNISYH

SEQ ID NO: 41447 - protein, 13 aa, BK virus
LQLSLFVNISYHI

SEQ ID NO: 41448 - protein, 13 aa, BK virus
QLSLFVNISYHIW

SEQ ID NO: 41449 - protein, 13 aa, BK virus
LSLFVNISYHIWV

SEQ ID NO: 41450 - protein, 13 aa, BK virus
SLFVNISYHIWVP

SEQ ID NO: 41451 - protein, 13 aa, BK virus
LFVNISYHIWVPW

SEQ ID NO: 41452 - protein, 13 aa, BK virus
FVNISYHIWVPWK

SEQ ID NO: 41453 - protein, 13 aa, BK virus
VNISYHIWVPWKS

SEQ ID NO: 41454 - protein, 13 aa, BK virus
NISYHIWVPWKSF

SEQ ID NO: 41455 - protein, 13 aa, BK virus
ISYHIWVPWKSFC

SEQ ID NO: 41456 - protein, 13 aa, BK virus
SYHIWVPWKSFCA

SEQ ID NO: 41457 - protein, 13 aa, BK virus
YHIWVPWKSFCAI

SEQ ID NO: 41458 - protein, 13 aa, BK virus
HIWVPWKSFCAIK

SEQ ID NO: 41459 - protein, 13 aa, BK virus
IWVPWKSFCAIKH

SEQ ID NO: 41460 - protein, 13 aa, BK virus
WVPWKSFCAIKHP

SEQ ID NO: 41461 - protein, 13 aa, BK virus
VPWKSFCAIKHPN

SEQ ID NO: 41462 - protein, 13 aa, BK virus
PWKSFCAIKHPNL

SEQ ID NO: 41463 - protein, 13 aa, BK virus
WKSFCAIKHPNLF

SEQ ID NO: 41464 - protein, 13 aa, BK virus
KSFCAIKHPNLFY

SEQ ID NO: 41465 - protein, 13 aa, BK virus
SFCAIKHPNLFYL

SEQ ID NO: 41466 - protein, 13 aa, BK virus
FCAIKHPNLFYLG

SEQ ID NO: 41467 - protein, 13 aa, BK virus
CAIKHPNLFYLGF

SEQ ID NO: 41468 - protein, 13 aa, BK virus
AIKHPNLFYLGFH

SEQ ID NO: 41469 - protein, 13 aa, BK virus
IKHPNLFYLGFHT

SEQ ID NO: 41470 - protein, 13 aa, BK virus
KHPNLFYLGFHTI

SEQ ID NO: 41471 - protein, 13 aa, BK virus
HPNLFYLGFHTIH

SEQ ID NO: 41472 - protein, 13 aa, BK virus
PNLFYLGFHTIHR

SEQ ID NO: 41473 - protein, 13 aa, BK virus
NLFYLGFHTIHRL

SEQ ID NO: 41474 - protein, 13 aa, BK virus
LFYLGFHTIHRLP

SEQ ID NO: 41475 - protein, 13 aa, BK virus
FYLGFHTIHRLPI

SEQ ID NO: 41476 - protein, 13 aa, BK virus
YLGFHTIHRLPIH

SEQ ID NO: 41477 - protein, 13 aa, BK virus
LGFHTIHRLPIHS

SEQ ID NO: 41478 - protein, 13 aa, BK virus
GFHTIHRLPIHSL

SEQ ID NO: 41479 - protein, 13 aa, BK virus
FHTIHRLPIHSLG

SEQ ID NO: 41480 - protein, 13 aa, BK virus
HTIHRLPIHSLGS

SEQ ID NO: 41481 - protein, 13 aa, BK virus
TIHRLPIHSLGSP

SEQ ID NO: 41482 - protein, 13 aa, BK virus
IHRLPIHSLGSPV

SEQ ID NO: 41483 - protein, 13 aa, BK virus
HRLPIHSLGSPVY

SEQ ID NO: 41484 - protein, 13 aa, BK virus
RLPIHSLGSPVYK

SEQ ID NO: 41485 - protein, 13 aa, BK virus
LPIHSLGSPVYKV

SEQ ID NO: 41486 - protein, 13 aa, BK virus
PIHSLGSPVYKVT

SEQ ID NO: 41487 - protein, 13 aa, BK virus
QKGNWVRILYRSF

SEQ ID NO: 41488 - protein, 13 aa, BK virus
KGNWVRILYRSFS

SEQ ID NO: 41489 - protein, 13 aa, BK virus
GNWVRILYRSFSQ

SEQ ID NO: 41490 - protein, 13 aa, BK virus
NWVRILYRSFSQA

SEQ ID NO: 41491 - protein, 13 aa, BK virus
WVRILYRSFSQAD

SEQ ID NO: 41492 - protein, 13 aa, BK virus
VRILYRSFSQADL

SEQ ID NO: 41493 - protein, 13 aa, BK virus
RILYRSFSQADLK

SEQ ID NO: 41494 - protein, 13 aa, BK virus
ILYRSFSQADLKI

SEQ ID NO: 41495 - protein, 13 aa, BK virus
LYRSFSQADLKIS

SEQ ID NO: 41496 - protein, 13 aa, BK virus
YRSFSQADLKISC

SEQ ID NO: 41497 - protein, 13 aa, BK virus
RSFSQADLKISCK

SEQ ID NO: 41498 - protein, 13 aa, BK virus
SFSQADLKISCKA

SEQ ID NO: 41499 - protein, 13 aa, BK virus
FSQADLKISCKAS

SEQ ID NO: 41500 - protein, 13 aa, BK virus
SQADLKISCKASP

SEQ ID NO: 41501 - protein, 13 aa, BK virus
QADLKISCKASPL

SEQ ID NO: 41502 - protein, 13 aa, BK virus
ADLKISCKASPLL

SEQ ID NO: 41503 - protein, 13 aa, BK virus
DLKISCKASPLLC

SEQ ID NO: 41504 - protein, 13 aa, BK virus
LKISCKASPLLCS

SEQ ID NO: 41505 - protein, 13 aa, BK virus
KISCKASPLLCSR

SEQ ID NO: 41506 - protein, 13 aa, BK virus
ISCKASPLLCSRA

SEQ ID NO: 41507 - protein, 13 aa, BK virus
SCKASPLLCSRAV

SEQ ID NO: 41508 - protein, 13 aa, BK virus
CKASPLLCSRAVS

SEQ ID NO: 41509 - protein, 13 aa, BK virus
KASPLLCSRAVSK

SEQ ID NO: 41510 - protein, 13 aa, BK virus
ASPLLCSRAVSKQ

SEQ ID NO: 41511 - protein, 13 aa, BK virus
SPLLCSRAVSKQA

SEQ ID NO: 41512 - protein, 13 aa, BK virus
PLLCSRAVSKQAT

SEQ ID NO: 41513 - protein, 13 aa, BK virus
LLCSRAVSKQATN

SEQ ID NO: 41514 - protein, 13 aa, BK virus
LCSRAVSKQATNI

SEQ ID NO: 41515 - protein, 13 aa, BK virus
CSRAVSKQATNIS

SEQ ID NO: 41516 - protein, 13 aa, BK virus
SRAVSKQATNISS

SEQ ID NO: 41517 - protein, 13 aa, BK virus
NIQAISFTKRPHT

SEQ ID NO: 41518 - protein, 13 aa, BK virus
IQAISFTKRPHTL

SEQ ID NO: 41519 - protein, 13 aa, BK virus
QAISFTKRPHTLF

SEQ ID NO: 41520 - protein, 13 aa, BK virus
AISFTKRPHTLFI

SEQ ID NO: 41521 - protein, 13 aa, BK virus
QHCGSCVGHMKYW

SEQ ID NO: 41522 - protein, 13 aa, BK virus
HCGSCVGHMKYWG

SEQ ID NO: 41523 - protein, 13 aa, BK virus
CGSCVGHMKYWGN

SEQ ID NO: 41524 - protein, 13 aa, BK virus
GSCVGHMKYWGNI

SEQ ID NO: 41525 - protein, 13 aa, BK virus
SCVGHMKYWGNIF

SEQ ID NO: 41526 - protein, 13 aa, BK virus
CVGHMKYWGNIFP

SEQ ID NO: 41527 - protein, 13 aa, BK virus
VGHMKYWGNIFPS

SEQ ID NO: 41528 - protein, 13 aa, BK virus
GHMKYWGNIFPSC

SEQ ID NO: 41529 - protein, 13 aa, BK virus
HMKYWGNIFPSCE

SEQ ID NO: 41530 - protein, 13 aa, BK virus
MKYWGNIFPSCES

SEQ ID NO: 41531 - protein, 13 aa, BK virus
KYWGNIFPSCESP

SEQ ID NO: 41532 - protein, 13 aa, BK virus
YWGNIFPSCESPK

SEQ ID NO: 41533 - protein, 13 aa, BK virus
WGNIFPSCESPKI

SEQ ID NO: 41534 - protein, 13 aa, BK virus
GNIFPSCESPKIP

SEQ ID NO: 41535 - protein, 13 aa, BK virus
NIFPSCESPKIPS

SEQ ID NO: 41536 - protein, 13 aa, BK virus
IFPSCESPKIPSI

SEQ ID NO: 41537 - protein, 13 aa, BK virus
FPSCESPKIPSIF

SEQ ID NO: 41538 - protein, 13 aa, BK virus
PSCESPKIPSIFI

SEQ ID NO: 41539 - protein, 13 aa, BK virus
SCESPKIPSIFIS

SEQ ID NO: 41540 - protein, 13 aa, BK virus
CESPKIPSIFIST

SEQ ID NO: 41541 - protein, 13 aa, BK virus
ESPKIPSIFISTG

SEQ ID NO: 41542 - protein, 13 aa, BK virus
SPKIPSIFISTGI

SEQ ID NO: 41543 - protein, 13 aa, BK virus
PKIPSIFISTGIR

SEQ ID NO: 41544 - protein, 13 aa, BK virus
KIPSIFISTGIRY

SEQ ID NO: 41545 - protein, 13 aa, BK virus
IPSIFISTGIRYP

SEQ ID NO: 41546 - protein, 13 aa, BK virus
PSIFISTGIRYPA

SEQ ID NO: 41547 - protein, 13 aa, BK virus
SIFISTGIRYPAL

SEQ ID NO: 41548 - protein, 13 aa, BK virus
IFISTGIRYPALN

SEQ ID NO: 41549 - protein, 13 aa, BK virus
FISTGIRYPALNW

SEQ ID NO: 41550 - protein, 13 aa, BK virus
ISTGIRYPALNWI

SEQ ID NO: 41551 - protein, 13 aa, BK virus
STGIRYPALNWIS

SEQ ID NO: 41552 - protein, 13 aa, BK virus
TGIRYPALNWISI

SEQ ID NO: 41553 - protein, 13 aa, BK virus
GIRYPALNWISIV

SEQ ID NO: 41554 - protein, 13 aa, BK virus
IRYPALNWISIVF

SEQ ID NO: 41555 - protein, 13 aa, BK virus
RYPALNWISIVFV

SEQ ID NO: 41556 - protein, 13 aa, BK virus
YPALNWISIVFVQ

SEQ ID NO: 41557 - protein, 13 aa, BK virus
PALNWISIVFVQI

SEQ ID NO: 41558 - protein, 13 aa, BK virus
ALNWISIVFVQIG

SEQ ID NO: 41559 - protein, 13 aa, BK virus
LNWISIVFVQIGL

SEQ ID NO: 41560 - protein, 13 aa, BK virus
NWISIVFVQIGLM

SEQ ID NO: 41561 - protein, 13 aa, BK virus
WISIVFVQIGLMV

SEQ ID NO: 41562 - protein, 13 aa, BK virus
ISIVFVQIGLMVS

SEQ ID NO: 41563 - protein, 13 aa, BK virus
SIVFVQIGLMVSI

SEQ ID NO: 41564 - protein, 13 aa, BK virus
IVFVQIGLMVSIH

SEQ ID NO: 41565 - protein, 13 aa, BK virus
VFVQIGLMVSIHY

SEQ ID NO: 41566 - protein, 13 aa, BK virus
FVQIGLMVSIHYL

SEQ ID NO: 41567 - protein, 13 aa, BK virus
VQIGLMVSIHYLG

SEQ ID NO: 41568 - protein, 13 aa, BK virus
QIGLMVSIHYLGL

SEQ ID NO: 41569 - protein, 13 aa, BK virus
IGLMVSIHYLGLG

SEQ ID NO: 41570 - protein, 13 aa, BK virus
GLMVSIHYLGLGC

SEQ ID NO: 41571 - protein, 13 aa, BK virus
LMVSIHYLGLGCW

SEQ ID NO: 41572 - protein, 13 aa, BK virus
MVSIHYLGLGCWV

SEQ ID NO: 41573 - protein, 13 aa, BK virus
VSIHYLGLGCWVF

SEQ ID NO: 41574 - protein, 13 aa, BK virus
SIHYLGLGCWVFR

SEQ ID NO: 41575 - protein, 13 aa, BK virus
IHYLGLGCWVFRG

SEQ ID NO: 41576 - protein, 13 aa, BK virus
HYLGLGCWVFRGY

SEQ ID NO: 41577 - protein, 13 aa, BK virus
YLGLGCWVFRGYS

SEQ ID NO: 41578 - protein, 13 aa, BK virus
LGLGCWVFRGYST

SEQ ID NO: 41579 - protein, 13 aa, BK virus
GLGCWVFRGYSTI

SEQ ID NO: 41580 - protein, 13 aa, BK virus
LGCWVFRGYSTIR

SEQ ID NO: 41581 - protein, 13 aa, BK virus
GCWVFRGYSTIRV

SEQ ID NO: 41582 - protein, 13 aa, BK virus
CWVFRGYSTIRVL

SEQ ID NO: 41583 - protein, 13 aa, BK virus
HSLHFQGFSTYSK

SEQ ID NO: 41584 - protein, 13 aa, BK virus
SLHFQGFSTYSKE

SEQ ID NO: 41585 - protein, 13 aa, BK virus
LHFQGFSTYSKEV

SEQ ID NO: 41586 - protein, 13 aa, BK virus
HFQGFSTYSKEVE

SEQ ID NO: 41587 - protein, 13 aa, BK virus
FQGFSTYSKEVEI

SEQ ID NO: 41588 - protein, 13 aa, BK virus
QGFSTYSKEVEIT

SEQ ID NO: 41589 - protein, 13 aa, BK virus
GFSTYSKEVEITA

SEQ ID NO: 41590 - protein, 13 aa, BK virus
FSTYSKEVEITAL

SEQ ID NO: 41591 - protein, 13 aa, BK virus
STYSKEVEITALN

SEQ ID NO: 41592 - protein, 13 aa, BK virus
TYSKEVEITALNR

SEQ ID NO: 41593 - protein, 13 aa, BK virus
YSKEVEITALNRF

SEQ ID NO: 41594 - protein, 13 aa, BK virus
SKEVEITALNRFS

SEQ ID NO: 41595 - protein, 13 aa, BK virus
KEVEITALNRFSS

SEQ ID NO: 41596 - protein, 13 aa, BK virus
EVEITALNRFSST

SEQ ID NO: 41597 - protein, 13 aa, BK virus
VEITALNRFSSTM

SEQ ID NO: 41598 - protein, 13 aa, BK virus
EITALNRFSSTML

SEQ ID NO: 41599 - protein, 13 aa, BK virus
ITALNRFSSTMLM

SEQ ID NO: 41600 - protein, 13 aa, BK virus
TALNRFSSTMLMH

SEQ ID NO: 41601 - protein, 13 aa, BK virus
ALNRFSSTMLMHF

SEQ ID NO: 41602 - protein, 13 aa, BK virus
LNRFSSTMLMHFL

SEQ ID NO: 41603 - protein, 13 aa, BK virus
PCMKVKHASYSNN

SEQ ID NO: 41604 - protein, 13 aa, BK virus
CMKVKHASYSNNL

SEQ ID NO: 41605 - protein, 13 aa, BK virus
MKVKHASYSNNLC

SEQ ID NO: 41606 - protein, 13 aa, BK virus
KVKHASYSNNLCL

SEQ ID NO: 41607 - protein, 13 aa, BK virus
VKHASYSNNLCLY

SEQ ID NO: 41608 - protein, 13 aa, BK virus
KHASYSNNLCLYS

SEQ ID NO: 41609 - protein, 13 aa, BK virus
HASYSNNLCLYSY

SEQ ID NO: 41610 - protein, 13 aa, BK virus
ASYSNNLCLYSYS

SEQ ID NO: 41611 - protein, 13 aa, BK virus
SYSNNLCLYSYSL

SEQ ID NO: 41612 - protein, 13 aa, BK virus
YSNNLCLYSYSLP

SEQ ID NO: 41613 - protein, 13 aa, BK virus
SNNLCLYSYSLPH

SEQ ID NO: 41614 - protein, 13 aa, BK virus
NNLCLYSYSLPHQ

SEQ ID NO: 41615 - protein, 13 aa, BK virus
IGEGNSCCAVTGK

SEQ ID NO: 41616 - protein, 13 aa, BK virus
GEGNSCCAVTGKH

SEQ ID NO: 41617 - protein, 13 aa, BK virus
EGNSCCAVTGKHF

SEQ ID NO: 41618 - protein, 13 aa, BK virus
GNSCCAVTGKHFS

SEQ ID NO: 41619 - protein, 13 aa, BK virus
NSCCAVTGKHFSL

SEQ ID NO: 41620 - protein, 13 aa, BK virus
SCCAVTGKHFSLW

SEQ ID NO: 41621 - protein, 13 aa, BK virus
CCAVTGKHFSLWA

SEQ ID NO: 41622 - protein, 13 aa, BK virus
CAVTGKHFSLWAI

SEQ ID NO: 41623 - protein, 13 aa, BK virus
AVTGKHFSLWAIT

SEQ ID NO: 41624 - protein, 13 aa, BK virus
VTGKHFSLWAITA

SEQ ID NO: 41625 - protein, 13 aa, BK virus
TGKHFSLWAITAK

SEQ ID NO: 41626 - protein, 13 aa, BK virus
GKHFSLWAITAKV

SEQ ID NO: 41627 - protein, 13 aa, BK virus
KHFSLWAITAKVI

SEQ ID NO: 41628 - protein, 13 aa, BK virus
HFSLWAITAKVIF

SEQ ID NO: 41629 - protein, 13 aa, BK virus
FSLWAITAKVIFS

SEQ ID NO: 41630 - protein, 13 aa, BK virus
SLWAITAKVIFST

SEQ ID NO: 41631 - protein, 13 aa, BK virus
TKAPKVFIWIPHF

SEQ ID NO: 41632 - protein, 13 aa, BK virus
KAPKVFIWIPHFW

SEQ ID NO: 41633 - protein, 13 aa, BK virus
APKVFIWIPHFWV

SEQ ID NO: 41634 - protein, 13 aa, BK virus
EAFYLCNSIYPSF

SEQ ID NO: 41635 - protein, 13 aa, BK virus
AFYLCNSIYPSFN

SEQ ID NO: 41636 - protein, 13 aa, BK virus
FYLCNSIYPSFNF

SEQ ID NO: 41637 - protein, 13 aa, BK virus
FWHLHGFLWLFGS

SEQ ID NO: 41638 - protein, 13 aa, BK virus
WHLHGFLWLFGSC

SEQ ID NO: 41639 - protein, 13 aa, BK virus
HLHGFLWLFGSCP

SEQ ID NO: 41640 - protein, 13 aa, BK virus
LHGFLWLFGSCPW

SEQ ID NO: 41641 - protein, 13 aa, BK virus
HGFLWLFGSCPWT

SEQ ID NO: 41642 - protein, 13 aa, BK virus
GFLWLFGSCPWTL

SEQ ID NO: 41643 - protein, 13 aa, BK virus
FLWLFGSCPWTLS

SEQ ID NO: 41644 - protein, 13 aa, BK virus
LWLFGSCPWTLSF

SEQ ID NO: 41645 - protein, 13 aa, BK virus
WLFGSCPWTLSFS

SEQ ID NO: 41646 - protein, 13 aa, BK virus
LFGSCPWTLSFSF

SEQ ID NO: 41647 - protein, 13 aa, BK virus
FGSCPWTLSFSFG

SEQ ID NO: 41648 - protein, 13 aa, BK virus
GSCPWTLSFSFGW

SEQ ID NO: 41649 - protein, 13 aa, BK virus
SCPWTLSFSFGWG

SEQ ID NO: 41650 - protein, 13 aa, BK virus
CPWTLSFSFGWGH

SEQ ID NO: 41651 - protein, 13 aa, BK virus
PWTLSFSFGWGHL

SEQ ID NO: 41652 - protein, 13 aa, BK virus
WTLSFSFGWGHLH

SEQ ID NO: 41653 - protein, 13 aa, BK virus
TLSFSFGWGHLHM

SEQ ID NO: 41654 - protein, 13 aa, BK virus
LSFSFGWGHLHML

SEQ ID NO: 41655 - protein, 13 aa, BK virus
SFSFGWGHLHMLQ

SEQ ID NO: 41656 - protein, 13 aa, BK virus
FSFGWGHLHMLQE

SEQ ID NO: 41657 - protein, 13 aa, BK virus
SFGWGHLHMLQEQ

SEQ ID NO: 41658 - protein, 13 aa, BK virus
FGWGHLHMLQEQV

SEQ ID NO: 41659 - protein, 13 aa, BK virus
GWGHLHMLQEQVL

SEQ ID NO: 41660 - protein, 13 aa, BK virus
WGHLHMLQEQVLQ

SEQ ID NO: 41661 - protein, 13 aa, BK virus
GHLHMLQEQVLQS

SEQ ID NO: 41662 - protein, 13 aa, BK virus
HLHMLQEQVLQSR

SEQ ID NO: 41663 - protein, 13 aa, BK virus
LHMLQEQVLQSRT

SEQ ID NO: 41664 - protein, 13 aa, BK virus
HMLQEQVLQSRTG

SEQ ID NO: 41665 - protein, 13 aa, BK virus
MLQEQVLQSRTGL

SEQ ID NO: 41666 - protein, 13 aa, BK virus
LQEQVLQSRTGLE

SEQ ID NO: 41667 - protein, 13 aa, BK virus
QEQVLQSRTGLEV

SEQ ID NO: 41668 - protein, 13 aa, BK virus
EQVLQSRTGLEVK

SEQ ID NO: 41669 - protein, 13 aa, BK virus
QVLQSRTGLEVKA

SEQ ID NO: 41670 - protein, 13 aa, BK virus
VLQSRTGLEVKAT

SEQ ID NO: 41671 - protein, 13 aa, BK virus
LQSRTGLEVKATS

SEQ ID NO: 41672 - protein, 13 aa, BK virus
QSRTGLEVKATSI

SEQ ID NO: 41673 - protein, 13 aa, BK virus
SRTGLEVKATSIE

SEQ ID NO: 41674 - protein, 13 aa, BK virus
RTGLEVKATSIEE

SEQ ID NO: 41675 - protein, 13 aa, BK virus
TGLEVKATSIEEQ

SEQ ID NO: 41676 - protein, 13 aa, BK virus
GLEVKATSIEEQF

SEQ ID NO: 41677 - protein, 13 aa, BK virus
LEVKATSIEEQFF

SEQ ID NO: 41678 - protein, 13 aa, BK virus
EVKATSIEEQFFD

SEQ ID NO: 41679 - protein, 13 aa, BK virus
TLLNVHFVDFLSP

SEQ ID NO: 41680 - protein, 13 aa, BK virus
LLNVHFVDFLSPF

SEQ ID NO: 41681 - protein, 13 aa, BK virus
LNVHFVDFLSPFF

SEQ ID NO: 41682 - protein, 13 aa, BK virus
NVHFVDFLSPFFV

SEQ ID NO: 41683 - protein, 13 aa, BK virus
LLLYCQHHLYYKY

SEQ ID NO: 41684 - protein, 13 aa, BK virus
LLYCQHHLYYKYG

SEQ ID NO: 41685 - protein, 13 aa, BK virus
LYCQHHLYYKYGQ

SEQ ID NO: 41686 - protein, 13 aa, BK virus
YCQHHLYYKYGQN

SEQ ID NO: 41687 - protein, 13 aa, BK virus
CQHHLYYKYGQNV

SEQ ID NO: 41688 - protein, 13 aa, BK virus
QHHLYYKYGQNVH

SEQ ID NO: 41689 - protein, 13 aa, BK virus
HHLYYKYGQNVHG

SEQ ID NO: 41690 - protein, 13 aa, BK virus
HLYYKYGQNVHGY

SEQ ID NO: 41691 - protein, 13 aa, BK virus
LYYKYGQNVHGYL

SEQ ID NO: 41692 - protein, 13 aa, BK virus
YYKYGQNVHGYLP

SEQ ID NO: 41693 - protein, 13 aa, BK virus
YKYGQNVHGYLPF

SEQ ID NO: 41694 - protein, 13 aa, BK virus
KYGQNVHGYLPFQ

SEQ ID NO: 41695 - protein, 13 aa, BK virus
YGQNVHGYLPFQL

SEQ ID NO: 41696 - protein, 13 aa, BK virus
GQNVHGYLPFQLL

SEQ ID NO: 41697 - protein, 13 aa, BK virus
QNVHGYLPFQLLV

SEQ ID NO: 41698 - protein, 13 aa, BK virus
GKDQNNIVEYNYK

SEQ ID NO: 41699 - protein, 13 aa, BK virus
KDQNNIVEYNYKS

SEQ ID NO: 41700 - protein, 13 aa, BK virus
DQNNIVEYNYKSL

SEQ ID NO: 41701 - protein, 13 aa, BK virus
KIFLFFSAIPVRL

SEQ ID NO: 41702 - protein, 13 aa, BK virus
QKYLHQETEYHST

SEQ ID NO: 41703 - protein, 13 aa, BK virus
KYLHQETEYHSTH

SEQ ID NO: 41704 - protein, 13 aa, BK virus
YLHQETEYHSTHL

SEQ ID NO: 41705 - protein, 13 aa, BK virus
LHQETEYHSTHLG

SEQ ID NO: 41706 - protein, 13 aa, BK virus
TIPKPCLIADRGL

SEQ ID NO: 41707 - protein, 13 aa, BK virus
IPKPCLIADRGLQ

SEQ ID NO: 41708 - protein, 13 aa, BK virus
PKPCLIADRGLQW

SEQ ID NO: 41709 - protein, 13 aa, BK virus
KPCLIADRGLQWK

SEQ ID NO: 41710 - protein, 13 aa, BK virus
PCLIADRGLQWKL

SEQ ID NO: 41711 - protein, 13 aa, BK virus
CLIADRGLQWKLC

SEQ ID NO: 41712 - protein, 13 aa, BK virus
LIADRGLQWKLCD

SEQ ID NO: 41713 - protein, 13 aa, BK virus
IADRGLQWKLCDP

SEQ ID NO: 41714 - protein, 13 aa, BK virus
ADRGLQWKLCDPN

SEQ ID NO: 41715 - protein, 13 aa, BK virus
DRGLQWKLCDPNH

SEQ ID NO: 41716 - protein, 13 aa, BK virus
RGLQWKLCDPNHQ

SEQ ID NO: 41717 - protein, 13 aa, BK virus
GLQWKLCDPNHQR

SEQ ID NO: 41718 - protein, 13 aa, BK virus
LQWKLCDPNHQRT

SEQ ID NO: 41719 - protein, 13 aa, BK virus
QWKLCDPNHQRTY

SEQ ID NO: 41720 - protein, 13 aa, BK virus
WKLCDPNHQRTYT

SEQ ID NO: 41721 - protein, 13 aa, BK virus
KLCDPNHQRTYTL

SEQ ID NO: 41722 - protein, 13 aa, BK virus
LCDPNHQRTYTLL

SEQ ID NO: 41723 - protein, 13 aa, BK virus
CDPNHQRTYTLLE

SEQ ID NO: 41724 - protein, 13 aa, BK virus
DPNHQRTYTLLEL

SEQ ID NO: 41725 - protein, 13 aa, BK virus
PNHQRTYTLLELR

SEQ ID NO: 41726 - protein, 13 aa, BK virus
NHQRTYTLLELRN

SEQ ID NO: 41727 - protein, 13 aa, BK virus
PQEHQQLQHMFEE

SEQ ID NO: 41728 - protein, 13 aa, BK virus
QEHQQLQHMFEEL

SEQ ID NO: 41729 - protein, 13 aa, BK virus
EHQQLQHMFEELG

SEQ ID NO: 41730 - protein, 13 aa, BK virus
HQQLQHMFEELGL

SEQ ID NO: 41731 - protein, 13 aa, BK virus
QQQPPQQQFQPLK

SEQ ID NO: 41732 - protein, 13 aa, BK virus
QQPPQQQFQPLKI

SEQ ID NO: 41733 - protein, 13 aa, BK virus
QPPQQQFQPLKIL

SEQ ID NO: 41734 - protein, 13 aa, BK virus
PPQQQFQPLKILW

SEQ ID NO: 41735 - protein, 13 aa, BK virus
PQQQFQPLKILWQ

SEQ ID NO: 41736 - protein, 13 aa, BK virus
QQQFQPLKILWQQ

SEQ ID NO: 41737 - protein, 13 aa, BK virus
QQFQPLKILWQQQ

SEQ ID NO: 41738 - protein, 13 aa, BK virus
QFQPLKILWQQQP

SEQ ID NO: 41739 - protein, 13 aa, BK virus
FQPLKILWQQQPQ

SEQ ID NO: 41740 - protein, 13 aa, BK virus
QPLKILWQQQPQI

SEQ ID NO: 41741 - protein, 13 aa, BK virus
PLKILWQQQPQIH

SEQ ID NO: 41742 - protein, 13 aa, BK virus
LKILWQQQPQIHW

SEQ ID NO: 41743 - protein, 13 aa, BK virus
KILWQQQPQIHWQ

SEQ ID NO: 41744 - protein, 13 aa, BK virus
ILWQQQPQIHWQL

SEQ ID NO: 41745 - protein, 13 aa, BK virus
LWQQQPQIHWQLG

SEQ ID NO: 41746 - protein, 13 aa, BK virus
WQQQPQIHWQLGP

SEQ ID NO: 41747 - protein, 13 aa, BK virus
QQQPQIHWQLGPP

SEQ ID NO: 41748 - protein, 13 aa, BK virus
QQPQIHWQLGPPK

SEQ ID NO: 41749 - protein, 13 aa, BK virus
QPQIHWQLGPPKV

SEQ ID NO: 41750 - protein, 13 aa, BK virus
PQIHWQLGPPKVL

SEQ ID NO: 41751 - protein, 13 aa, BK virus
QIHWQLGPPKVLE

SEQ ID NO: 41752 - protein, 13 aa, BK virus
IHWQLGPPKVLEQ

SEQ ID NO: 41753 - protein, 13 aa, BK virus
HWQLGPPKVLEQH

SEQ ID NO: 41754 - protein, 13 aa, BK virus
WQLGPPKVLEQHP

SEQ ID NO: 41755 - protein, 13 aa, BK virus
TWKYKKKGITYLG

SEQ ID NO: 41756 - protein, 13 aa, BK virus
WKYKKKGITYLGV

SEQ ID NO: 41757 - protein, 13 aa, BK virus
KYKKKGITYLGVF

SEQ ID NO: 41758 - protein, 13 aa, BK virus
YKKKGITYLGVFY

SEQ ID NO: 41759 - protein, 13 aa, BK virus
KKKGITYLGVFYR

SEQ ID NO: 41760 - protein, 13 aa, BK virus
KKGITYLGVFYRV

SEQ ID NO: 41761 - protein, 13 aa, BK virus
KGITYLGVFYRVF

SEQ ID NO: 41762 - protein, 13 aa, BK virus
GITYLGVFYRVFY

SEQ ID NO: 41763 - protein, 13 aa, BK virus
ITYLGVFYRVFYS

SEQ ID NO: 41764 - protein, 13 aa, BK virus
TYLGVFYRVFYSR

SEQ ID NO: 41765 - protein, 13 aa, BK virus
SSGTFVFPVYTVF

SEQ ID NO: 41766 - protein, 13 aa, BK virus
SGTFVFPVYTVFT

SEQ ID NO: 41767 - protein, 13 aa, BK virus
GTFVFPVYTVFTS

SEQ ID NO: 41768 - protein, 13 aa, BK virus
TFVFPVYTVFTST

SEQ ID NO: 41769 - protein, 13 aa, BK virus
FVFPVYTVFTSTK

SEQ ID NO: 41770 - protein, 13 aa, BK virus
VFPVYTVFTSTKF

SEQ ID NO: 41771 - protein, 13 aa, BK virus
FPVYTVFTSTKFQ

SEQ ID NO: 41772 - protein, 13 aa, BK virus
PVYTVFTSTKFQQ

SEQ ID NO: 41773 - protein, 13 aa, BK virus
VYTVFTSTKFQQK

SEQ ID NO: 41774 - protein, 13 aa, BK virus
YTVFTSTKFQQKL

SEQ ID NO: 41775 - protein, 13 aa, BK virus
NKNKNPLSSFFCS

SEQ ID NO: 41776 - protein, 13 aa, BK virus
KNKNPLSSFFCSS

SEQ ID NO: 41777 - protein, 13 aa, BK virus
NKNPLSSFFCSSP

SEQ ID NO: 41778 - protein, 13 aa, BK virus
KNPLSSFFCSSPG

SEQ ID NO: 41779 - protein, 13 aa, BK virus
NPLSSFFCSSPGF

SEQ ID NO: 41780 - protein, 13 aa, BK virus
PLSSFFCSSPGFT

SEQ ID NO: 41781 - protein, 13 aa, BK virus
LSSFFCSSPGFTN

SEQ ID NO: 41782 - protein, 13 aa, BK virus
SSFFCSSPGFTNF

SEQ ID NO: 41783 - protein, 13 aa, BK virus
SFFCSSPGFTNFH

SEQ ID NO: 41784 - protein, 13 aa, BK virus
LGTRPRFLGSQNM

SEQ ID NO: 41785 - protein, 13 aa, BK virus
GTRPRFLGSQNMS

SEQ ID NO: 41786 - protein, 13 aa, BK virus
TRPRFLGSQNMSV

SEQ ID NO: 41787 - protein, 13 aa, BK virus
RPRFLGSQNMSVM

SEQ ID NO: 41788 - protein, 13 aa, BK virus
PRFLGSQNMSVMH

SEQ ID NO: 41789 - protein, 13 aa, BK virus
RFLGSQNMSVMHF

SEQ ID NO: 41790 - protein, 13 aa, BK virus
FLGSQNMSVMHFP

SEQ ID NO: 41791 - protein, 13 aa, BK virus
LGSQNMSVMHFPS

SEQ ID NO: 41792 - protein, 13 aa, BK virus
AAPPCESCTFLPE

SEQ ID NO: 41793 - protein, 13 aa, BK virus
APPCESCTFLPEV

SEQ ID NO: 41794 - protein, 13 aa, BK virus
PPCESCTFLPEVM

SEQ ID NO: 41795 - protein, 13 aa, BK virus
PCESCTFLPEVMV

SEQ ID NO: 41796 - protein, 13 aa, BK virus
CESCTFLPEVMVW

SEQ ID NO: 41797 - protein, 13 aa, BK virus
ESCTFLPEVMVWL

SEQ ID NO: 41798 - protein, 13 aa, BK virus
SCTFLPEVMVWLH

SEQ ID NO: 41799 - protein, 13 aa, BK virus
CTFLPEVMVWLHS

SEQ ID NO: 41800 - protein, 13 aa, BK virus
TFLPEVMVWLHSP

SEQ ID NO: 41801 - protein, 13 aa, BK virus
FLPEVMVWLHSPV

SEQ ID NO: 41802 - protein, 13 aa, BK virus
LPEVMVWLHSPVS

SEQ ID NO: 41803 - protein, 13 aa, BK virus
PEVMVWLHSPVSH

SEQ ID NO: 41804 - protein, 13 aa, BK virus
EVMVWLHSPVSHA

SEQ ID NO: 41805 - protein, 13 aa, BK virus
VMVWLHSPVSHAL

SEQ ID NO: 41806 - protein, 13 aa, BK virus
MVWLHSPVSHALS

SEQ ID NO: 41807 - protein, 13 aa, BK virus
VWLHSPVSHALSF

SEQ ID NO: 41808 - protein, 13 aa, BK virus
WLHSPVSHALSFL

SEQ ID NO: 41809 - protein, 13 aa, BK virus
LHSPVSHALSFLR

SEQ ID NO: 41810 - protein, 13 aa, BK virus
HSPVSHALSFLRS

SEQ ID NO: 41811 - protein, 13 aa, BK virus
SPVSHALSFLRSW

SEQ ID NO: 41812 - protein, 13 aa, BK virus
PVSHALSFLRSWF

SEQ ID NO: 41813 - protein, 13 aa, BK virus
VSHALSFLRSWFG

SEQ ID NO: 41814 - protein, 13 aa, BK virus
SHALSFLRSWFGC

SEQ ID NO: 41815 - protein, 13 aa, BK virus
HALSFLRSWFGCI

SEQ ID NO: 41816 - protein, 13 aa, BK virus
ALSFLRSWFGCIP

SEQ ID NO: 41817 - protein, 13 aa, BK virus
LSFLRSWFGCIPW

SEQ ID NO: 41818 - protein, 13 aa, BK virus
SFLRSWFGCIPWV

SEQ ID NO: 41819 - protein, 13 aa, BK virus
FLRSWFGCIPWVS

SEQ ID NO: 41820 - protein, 13 aa, BK virus
LRSWFGCIPWVSS

SEQ ID NO: 41821 - protein, 13 aa, BK virus
RSWFGCIPWVSSS

SEQ ID NO: 41822 - protein, 13 aa, BK virus
SWFGCIPWVSSSS

SEQ ID NO: 41823 - protein, 13 aa, BK virus
WFGCIPWVSSSSL

SEQ ID NO: 41824 - protein, 13 aa, BK virus
FGCIPWVSSSSLW

SEQ ID NO: 41825 - protein, 13 aa, BK virus
GCIPWVSSSSLWP

SEQ ID NO: 41826 - protein, 13 aa, BK virus
CIPWVSSSSLWPF

SEQ ID NO: 41827 - protein, 13 aa, BK virus
IPWVSSSSLWPFF

SEQ ID NO: 41828 - protein, 13 aa, BK virus
PWVSSSSLWPFFL

SEQ ID NO: 41829 - protein, 13 aa, BK virus
YIRGRGRLCLHPF

SEQ ID NO: 41830 - protein, 13 aa, BK virus
IRGRGRLCLHPFS

SEQ ID NO: 41831 - protein, 13 aa, BK virus
RGRGRLCLHPFSQ

SEQ ID NO: 41832 - protein, 13 aa, BK virus
GRGRLCLHPFSQV

SEQ ID NO: 41833 - protein, 13 aa, BK virus
RGRLCLHPFSQVV

SEQ ID NO: 41834 - protein, 13 aa, BK virus
GRLCLHPFSQVVR

SEQ ID NO: 41835 - protein, 13 aa, BK virus
RLCLHPFSQVVRV

SEQ ID NO: 41836 - protein, 13 aa, BK virus
LCLHPFSQVVRVW

SEQ ID NO: 41837 - protein, 13 aa, BK virus
CLHPFSQVVRVWR

SEQ ID NO: 41838 - protein, 13 aa, BK virus
LHPFSQVVRVWRL

SEQ ID NO: 41839 - protein, 13 aa, BK virus
HPFSQVVRVWRLF

SEQ ID NO: 41840 - protein, 13 aa, BK virus
PFSQVVRVWRLFL

SEQ ID NO: 41841 - protein, 13 aa, BK virus
FSQVVRVWRLFLR

SEQ ID NO: 41842 - protein, 13 aa, BK virus
SQVVRVWRLFLRP

SEQ ID NO: 41843 - protein, 13 aa, BK virus
QVVRVWRLFLRPS

SEQ ID NO: 41844 - protein, 13 aa, BK virus
VVRVWRLFLRPSK

SEQ ID NO: 41845 - protein, 13 aa, BK virus
VRVWRLFLRPSKT

SEQ ID NO: 41846 - protein, 13 aa, BK virus
RVWRLFLRPSKTI

SEQ ID NO: 41847 - protein, 13 aa, BK virus
VWRLFLRPSKTIW

SEQ ID NO: 41848 - protein, 13 aa, BK virus
WRLFLRPSKTIWG

SEQ ID NO: 41849 - protein, 13 aa, BK virus
RLFLRPSKTIWGN

SEQ ID NO: 41850 - protein, 13 aa, BK virus
LFLRPSKTIWGNP

SEQ ID NO: 41851 - protein, 13 aa, BK virus
FLRPSKTIWGNPY

SEQ ID NO: 41852 - protein, 13 aa, BK virus
LRPSKTIWGNPYS

SEQ ID NO: 41853 - protein, 13 aa, BK virus
RPSKTIWGNPYSF

SEQ ID NO: 41854 - protein, 13 aa, BK virus
PSKTIWGNPYSFA

SEQ ID NO: 41855 - protein, 13 aa, BK virus
SKTIWGNPYSFAI

SEQ ID NO: 41856 - protein, 13 aa, BK virus
KTIWGNPYSFAIF

SEQ ID NO: 41857 - protein, 13 aa, BK virus
TIWGNPYSFAIFA

SEQ ID NO: 41858 - protein, 13 aa, BK virus
IWGNPYSFAIFAK

SEQ ID NO: 41859 - protein, 14 aa, BK virus
KSCLGKSSLNEKSL

SEQ ID NO: 41860 - protein, 14 aa, BK virus
SCLGKSSLNEKSLF

SEQ ID NO: 41861 - protein, 14 aa, BK virus
CLGKSSLNEKSLFK

SEQ ID NO: 41862 - protein, 14 aa, BK virus
LGKSSLNEKSLFKE

SEQ ID NO: 41863 - protein, 14 aa, BK virus
GKSSLNEKSLFKEV

SEQ ID NO: 41864 - protein, 14 aa, BK virus
FSSLPRYPVLQGMA

SEQ ID NO: 41865 - protein, 14 aa, BK virus
SSLPRYPVLQGMAY

SEQ ID NO: 41866 - protein, 14 aa, BK virus
SLPRYPVLQGMAYL

SEQ ID NO: 41867 - protein, 14 aa, BK virus
LPRYPVLQGMAYLF

SEQ ID NO: 41868 - protein, 14 aa, BK virus
PRYPVLQGMAYLFQ

SEQ ID NO: 41869 - protein, 14 aa, BK virus
RYPVLQGMAYLFQK

SEQ ID NO: 41870 - protein, 14 aa, BK virus
YPVLQGMAYLFQKA

SEQ ID NO: 41871 - protein, 14 aa, BK virus
PVLQGMAYLFQKAF

SEQ ID NO: 41872 - protein, 14 aa, BK virus
VLQGMAYLFQKAFC

SEQ ID NO: 41873 - protein, 14 aa, BK virus
LQGMAYLFQKAFCA

SEQ ID NO: 41874 - protein, 14 aa, BK virus
QGMAYLFQKAFCAL

SEQ ID NO: 41875 - protein, 14 aa, BK virus
GMAYLFQKAFCALP

SEQ ID NO: 41876 - protein, 14 aa, BK virus
MAYLFQKAFCALPL

SEQ ID NO: 41877 - protein, 14 aa, BK virus
AYLFQKAFCALPLH

SEQ ID NO: 41878 - protein, 14 aa, BK virus
YLFQKAFCALPLHA

SEQ ID NO: 41879 - protein, 14 aa, BK virus
LFQKAFCALPLHAM

SEQ ID NO: 41880 - protein, 14 aa, BK virus
FQKAFCALPLHAMS

SEQ ID NO: 41881 - protein, 14 aa, BK virus
QKAFCALPLHAMSA

SEQ ID NO: 41882 - protein, 14 aa, BK virus
KIFKKRALGLDRLL

SEQ ID NO: 41883 - protein, 14 aa, BK virus
IFKKRALGLDRLLL

SEQ ID NO: 41884 - protein, 14 aa, BK virus
FKKRALGLDRLLLH

SEQ ID NO: 41885 - protein, 14 aa, BK virus
RNSAMVGPNNWRNS

SEQ ID NO: 41886 - protein, 14 aa, BK virus
NSAMVGPNNWRNSL

SEQ ID NO: 41887 - protein, 14 aa, BK virus
SAMVGPNNWRNSLQ

SEQ ID NO: 41888 - protein, 14 aa, BK virus
AMVGPNNWRNSLQR

SEQ ID NO: 41889 - protein, 14 aa, BK virus
MVGPNNWRNSLQRS

SEQ ID NO: 41890 - protein, 14 aa, BK virus
VGPNNWRNSLQRSK

SEQ ID NO: 41891 - protein, 14 aa, BK virus
GPNNWRNSLQRSKA

SEQ ID NO: 41892 - protein, 14 aa, BK virus
PNNWRNSLQRSKAL

SEQ ID NO: 41893 - protein, 14 aa, BK virus
NNWRNSLQRSKALR

SEQ ID NO: 41894 - protein, 14 aa, BK virus
VPTYGTEEWESWWS

SEQ ID NO: 41895 - protein, 14 aa, BK virus
PTYGTEEWESWWSS

SEQ ID NO: 41896 - protein, 14 aa, BK virus
TYGTEEWESWWSSF

SEQ ID NO: 41897 - protein, 14 aa, BK virus
YGTEEWESWWSSFN

SEQ ID NO: 41898 - protein, 14 aa, BK virus
GTEEWESWWSSFNE

SEQ ID NO: 41899 - protein, 14 aa, BK virus
TEEWESWWSSFNEK

SEQ ID NO: 41900 - protein, 14 aa, BK virus
EEWESWWSSFNEKW

SEQ ID NO: 41901 - protein, 14 aa, BK virus
EWESWWSSFNEKWD

SEQ ID NO: 41902 - protein, 14 aa, BK virus
WESWWSSFNEKWDE

SEQ ID NO: 41903 - protein, 14 aa, BK virus
ESWWSSFNEKWDED

SEQ ID NO: 41904 - protein, 14 aa, BK virus
SWWSSFNEKWDEDL

SEQ ID NO: 41905 - protein, 14 aa, BK virus
WWSSFNEKWDEDLF

SEQ ID NO: 41906 - protein, 14 aa, BK virus
WSSFNEKWDEDLFC

SEQ ID NO: 41907 - protein, 14 aa, BK virus
SSFNEKWDEDLFCH

SEQ ID NO: 41908 - protein, 14 aa, BK virus
SFNEKWDEDLFCHE

SEQ ID NO: 41909 - protein, 14 aa, BK virus
FNEKWDEDLFCHED

SEQ ID NO: 41910 - protein, 14 aa, BK virus
NEKWDEDLFCHEDM

SEQ ID NO: 41911 - protein, 14 aa, BK virus
EKWDEDLFCHEDMF

SEQ ID NO: 41912 - protein, 14 aa, BK virus
KWDEDLFCHEDMFA

SEQ ID NO: 41913 - protein, 14 aa, BK virus
WDEDLFCHEDMFAS

SEQ ID NO: 41914 - protein, 14 aa, BK virus
DEDLFCHEDMFASD

SEQ ID NO: 41915 - protein, 14 aa, BK virus
EDLFCHEDMFASDE

SEQ ID NO: 41916 - protein, 14 aa, BK virus
DLFCHEDMFASDEE

SEQ ID NO: 41917 - protein, 14 aa, BK virus
LFCHEDMFASDEEA

SEQ ID NO: 41918 - protein, 14 aa, BK virus
FCHEDMFASDEEAT

SEQ ID NO: 41919 - protein, 14 aa, BK virus
CHEDMFASDEEATA

SEQ ID NO: 41920 - protein, 14 aa, BK virus
HEDMFASDEEATAD

SEQ ID NO: 41921 - protein, 14 aa, BK virus
EDMFASDEEATADS

SEQ ID NO: 41922 - protein, 14 aa, BK virus
DMFASDEEATADSQ

SEQ ID NO: 41923 - protein, 14 aa, BK virus
MFASDEEATADSQH

SEQ ID NO: 41924 - protein, 14 aa, BK virus
FASDEEATADSQHS

SEQ ID NO: 41925 - protein, 14 aa, BK virus
ASDEEATADSQHST

SEQ ID NO: 41926 - protein, 14 aa, BK virus
SDEEATADSQHSTP

SEQ ID NO: 41927 - protein, 14 aa, BK virus
DEEATADSQHSTPP

SEQ ID NO: 41928 - protein, 14 aa, BK virus
EEATADSQHSTPPK

SEQ ID NO: 41929 - protein, 14 aa, BK virus
EATADSQHSTPPKK

SEQ ID NO: 41930 - protein, 14 aa, BK virus
ATADSQHSTPPKKK

SEQ ID NO: 41931 - protein, 14 aa, BK virus
TADSQHSTPPKKKR

SEQ ID NO: 41932 - protein, 14 aa, BK virus
ADSQHSTPPKKKRK

SEQ ID NO: 41933 - protein, 14 aa, BK virus
DSQHSTPPKKKRKV

SEQ ID NO: 41934 - protein, 14 aa, BK virus
SQHSTPPKKKRKVE

SEQ ID NO: 41935 - protein, 14 aa, BK virus
QHSTPPKKKRKVED

SEQ ID NO: 41936 - protein, 14 aa, BK virus
HSTPPKKKRKVEDP

SEQ ID NO: 41937 - protein, 14 aa, BK virus
STPPKKKRKVEDPK

SEQ ID NO: 41938 - protein, 14 aa, BK virus
TPPKKKRKVEDPKD

SEQ ID NO: 41939 - protein, 14 aa, BK virus
PPKKKRKVEDPKDF

SEQ ID NO: 41940 - protein, 14 aa, BK virus
PKKKRKVEDPKDFP

SEQ ID NO: 41941 - protein, 14 aa, BK virus
KKKRKVEDPKDFPS

SEQ ID NO: 41942 - protein, 14 aa, BK virus
KKRKVEDPKDFPSD

SEQ ID NO: 41943 - protein, 14 aa, BK virus
KRKVEDPKDFPSDL

SEQ ID NO: 41944 - protein, 14 aa, BK virus
RKVEDPKDFPSDLH

SEQ ID NO: 41945 - protein, 14 aa, BK virus
KVEDPKDFPSDLHQ

SEQ ID NO: 41946 - protein, 14 aa, BK virus
VEDPKDFPSDLHQF

SEQ ID NO: 41947 - protein, 14 aa, BK virus
EDPKDFPSDLHQFL

SEQ ID NO: 41948 - protein, 14 aa, BK virus
DPKDFPSDLHQFLS

SEQ ID NO: 41949 - protein, 14 aa, BK virus
PKDFPSDLHQFLSQ

SEQ ID NO: 41950 - protein, 14 aa, BK virus
KDFPSDLHQFLSQA

SEQ ID NO: 41951 - protein, 14 aa, BK virus
DFPSDLHQFLSQAV

SEQ ID NO: 41952 - protein, 14 aa, BK virus
FPSDLHQFLSQAVF

SEQ ID NO: 41953 - protein, 14 aa, BK virus
PSDLHQFLSQAVFS

SEQ ID NO: 41954 - protein, 14 aa, BK virus
SDLHQFLSQAVFSN

SEQ ID NO: 41955 - protein, 14 aa, BK virus
DLHQFLSQAVFSNR

SEQ ID NO: 41956 - protein, 14 aa, BK virus
LHQFLSQAVFSNRT

SEQ ID NO: 41957 - protein, 14 aa, BK virus
HQFLSQAVFSNRTL

SEQ ID NO: 41958 - protein, 14 aa, BK virus
QFLSQAVFSNRTLA

SEQ ID NO: 41959 - protein, 14 aa, BK virus
FLSQAVFSNRTLAC

SEQ ID NO: 41960 - protein, 14 aa, BK virus
LSQAVFSNRTLACF

SEQ ID NO: 41961 - protein, 14 aa, BK virus
SQAVFSNRTLACFA

SEQ ID NO: 41962 - protein, 14 aa, BK virus
QAVFSNRTLACFAV

SEQ ID NO: 41963 - protein, 14 aa, BK virus
AVFSNRTLACFAVY

SEQ ID NO: 41964 - protein, 14 aa, BK virus
VFSNRTLACFAVYT

SEQ ID NO: 41965 - protein, 14 aa, BK virus
FSNRTLACFAVYTT

SEQ ID NO: 41966 - protein, 14 aa, BK virus
SNRTLACFAVYTTK

SEQ ID NO: 41967 - protein, 14 aa, BK virus
NRTLACFAVYTTKE

SEQ ID NO: 41968 - protein, 14 aa, BK virus
RTLACFAVYTTKEK

SEQ ID NO: 41969 - protein, 14 aa, BK virus
TLACFAVYTTKEKA

SEQ ID NO: 41970 - protein, 14 aa, BK virus
LACFAVYTTKEKAQ

SEQ ID NO: 41971 - protein, 14 aa, BK virus
ACFAVYTTKEKAQI

SEQ ID NO: 41972 - protein, 14 aa, BK virus
CFAVYTTKEKAQIL

SEQ ID NO: 41973 - protein, 14 aa, BK virus
FAVYTTKEKAQILY

SEQ ID NO: 41974 - protein, 14 aa, BK virus
AVYTTKEKAQILYK

SEQ ID NO: 41975 - protein, 14 aa, BK virus
VYTTKEKAQILYKK

SEQ ID NO: 41976 - protein, 14 aa, BK virus
YTTKEKAQILYKKL

SEQ ID NO: 41977 - protein, 14 aa, BK virus
TTKEKAQILYKKLM

SEQ ID NO: 41978 - protein, 14 aa, BK virus
TKEKAQILYKKLME

SEQ ID NO: 41979 - protein, 14 aa, BK virus
KEKAQILYKKLMEK

SEQ ID NO: 41980 - protein, 14 aa, BK virus
EKAQILYKKLMEKY

SEQ ID NO: 41981 - protein, 14 aa, BK virus
KAQILYKKLMEKYS

SEQ ID NO: 41982 - protein, 14 aa, BK virus
AQILYKKLMEKYSV

SEQ ID NO: 41983 - protein, 14 aa, BK virus
QILYKKLMEKYSVT

SEQ ID NO: 41984 - protein, 14 aa, BK virus
ILYKKLMEKYSVTF

SEQ ID NO: 41985 - protein, 14 aa, BK virus
LYKKLMEKYSVTFI

SEQ ID NO: 41986 - protein, 14 aa, BK virus
YKKLMEKYSVTFIS

SEQ ID NO: 41987 - protein, 14 aa, BK virus
KKLMEKYSVTFISR

SEQ ID NO: 41988 - protein, 14 aa, BK virus
KLMEKYSVTFISRH

SEQ ID NO: 41989 - protein, 14 aa, BK virus
LMEKYSVTFISRHM

SEQ ID NO: 41990 - protein, 14 aa, BK virus
MEKYSVTFISRHMC

SEQ ID NO: 41991 - protein, 14 aa, BK virus
EKYSVTFISRHMCA

SEQ ID NO: 41992 - protein, 14 aa, BK virus
KYSVTFISRHMCAG

SEQ ID NO: 41993 - protein, 14 aa, BK virus
YSVTFISRHMCAGH

SEQ ID NO: 41994 - protein, 14 aa, BK virus
SVTFISRHMCAGHN

SEQ ID NO: 41995 - protein, 14 aa, BK virus
VTFISRHMCAGHNI

SEQ ID NO: 41996 - protein, 14 aa, BK virus
TFISRHMCAGHNII

SEQ ID NO: 41997 - protein, 14 aa, BK virus
FISRHMCAGHNIIF

SEQ ID NO: 41998 - protein, 14 aa, BK virus
ISRHMCAGHNIIFF

SEQ ID NO: 41999 - protein, 14 aa, BK virus
SRHMCAGHNIIFFL

SEQ ID NO: 42000 - protein, 14 aa, BK virus
RHMCAGHNIIFFLT

SEQ ID NO: 42001 - protein, 14 aa, BK virus
HMCAGHNIIFFLTP

SEQ ID NO: 42002 - protein, 14 aa, BK virus
MCAGHNIIFFLTPH

SEQ ID NO: 42003 - protein, 14 aa, BK virus
CAGHNIIFFLTPHR

SEQ ID NO: 42004 - protein, 14 aa, BK virus
AGHNIIFFLTPHRH

SEQ ID NO: 42005 - protein, 14 aa, BK virus
GHNIIFFLTPHRHR

SEQ ID NO: 42006 - protein, 14 aa, BK virus
HNIIFFLTPHRHRV

SEQ ID NO: 42007 - protein, 14 aa, BK virus
NIIFFLTPHRHRVS

SEQ ID NO: 42008 - protein, 14 aa, BK virus
IIFFLTPHRHRVSA

SEQ ID NO: 42009 - protein, 14 aa, BK virus
IFFLTPHRHRVSAI

SEQ ID NO: 42010 - protein, 14 aa, BK virus
FFLTPHRHRVSAIN

SEQ ID NO: 42011 - protein, 14 aa, BK virus
FLTPHRHRVSAINN

SEQ ID NO: 42012 - protein, 14 aa, BK virus
LTPHRHRVSAINNF

SEQ ID NO: 42013 - protein, 14 aa, BK virus
TPHRHRVSAINNFC

SEQ ID NO: 42014 - protein, 14 aa, BK virus
PHRHRVSAINNFCQ

SEQ ID NO: 42015 - protein, 14 aa, BK virus
HRHRVSAINNFCQK

SEQ ID NO: 42016 - protein, 14 aa, BK virus
RHRVSAINNFCQKL

SEQ ID NO: 42017 - protein, 14 aa, BK virus
HRVSAINNFCQKLC

SEQ ID NO: 42018 - protein, 14 aa, BK virus
RVSAINNFCQKLCT

SEQ ID NO: 42019 - protein, 14 aa, BK virus
VSAINNFCQKLCTF

SEQ ID NO: 42020 - protein, 14 aa, BK virus
SAINNFCQKLCTFS

SEQ ID NO: 42021 - protein, 14 aa, BK virus
AINNFCQKLCTFSF

SEQ ID NO: 42022 - protein, 14 aa, BK virus
INNFCQKLCTFSFL

SEQ ID NO: 42023 - protein, 14 aa, BK virus
NNFCQKLCTFSFLI

SEQ ID NO: 42024 - protein, 14 aa, BK virus
NFCQKLCTFSFLIC

SEQ ID NO: 42025 - protein, 14 aa, BK virus
FCQKLCTFSFLICK

SEQ ID NO: 42026 - protein, 14 aa, BK virus
CQKLCTFSFLICKG

SEQ ID NO: 42027 - protein, 14 aa, BK virus
QKLCTFSFLICKGV

SEQ ID NO: 42028 - protein, 14 aa, BK virus
KLCTFSFLICKGVN

SEQ ID NO: 42029 - protein, 14 aa, BK virus
LCTFSFLICKGVNK

SEQ ID NO: 42030 - protein, 14 aa, BK virus
CTFSFLICKGVNKE

SEQ ID NO: 42031 - protein, 14 aa, BK virus
TFSFLICKGVNKEY

SEQ ID NO: 42032 - protein, 14 aa, BK virus
FSFLICKGVNKEYL

SEQ ID NO: 42033 - protein, 14 aa, BK virus
SFLICKGVNKEYLL

SEQ ID NO: 42034 - protein, 14 aa, BK virus
FLICKGVNKEYLLY

SEQ ID NO: 42035 - protein, 14 aa, BK virus
LICKGVNKEYLLYS

SEQ ID NO: 42036 - protein, 14 aa, BK virus
ICKGVNKEYLLYSA

SEQ ID NO: 42037 - protein, 14 aa, BK virus
CKGVNKEYLLYSAL

SEQ ID NO: 42038 - protein, 14 aa, BK virus
KGVNKEYLLYSALT

SEQ ID NO: 42039 - protein, 14 aa, BK virus
GVNKEYLLYSALTR

SEQ ID NO: 42040 - protein, 14 aa, BK virus
VNKEYLLYSALTRD

SEQ ID NO: 42041 - protein, 14 aa, BK virus
NKEYLLYSALTRDP

SEQ ID NO: 42042 - protein, 14 aa, BK virus
KEYLLYSALTRDPY

SEQ ID NO: 42043 - protein, 14 aa, BK virus
EYLLYSALTRDPYH

SEQ ID NO: 42044 - protein, 14 aa, BK virus
YLLYSALTRDPYHT

SEQ ID NO: 42045 - protein, 14 aa, BK virus
LLYSALTRDPYHTI

SEQ ID NO: 42046 - protein, 14 aa, BK virus
LYSALTRDPYHTIE

SEQ ID NO: 42047 - protein, 14 aa, BK virus
YSALTRDPYHTIEE

SEQ ID NO: 42048 - protein, 14 aa, BK virus
SALTRDPYHTIEES

SEQ ID NO: 42049 - protein, 14 aa, BK virus
ALTRDPYHTIEESI

SEQ ID NO: 42050 - protein, 14 aa, BK virus
LTRDPYHTIEESIQ

SEQ ID NO: 42051 - protein, 14 aa, BK virus
TRDPYHTIEESIQG

SEQ ID NO: 42052 - protein, 14 aa, BK virus
RDPYHTIEESIQGG

SEQ ID NO: 42053 - protein, 14 aa, BK virus
DPYHTIEESIQGGL

SEQ ID NO: 42054 - protein, 14 aa, BK virus
PYHTIEESIQGGLK

SEQ ID NO: 42055 - protein, 14 aa, BK virus
YHTIEESIQGGLKE

SEQ ID NO: 42056 - protein, 14 aa, BK virus
HTIEESIQGGLKEH

SEQ ID NO: 42057 - protein, 14 aa, BK virus
TIEESIQGGLKEHD

SEQ ID NO: 42058 - protein, 14 aa, BK virus
IEESIQGGLKEHDF

SEQ ID NO: 42059 - protein, 14 aa, BK virus
EESIQGGLKEHDFS

SEQ ID NO: 42060 - protein, 14 aa, BK virus
ESIQGGLKEHDFSP

SEQ ID NO: 42061 - protein, 14 aa, BK virus
SIQGGLKEHDFSPE

SEQ ID NO: 42062 - protein, 14 aa, BK virus
IQGGLKEHDFSPEE

SEQ ID NO: 42063 - protein, 14 aa, BK virus
QGGLKEHDFSPEEP

SEQ ID NO: 42064 - protein, 14 aa, BK virus
GGLKEHDFSPEEPE

SEQ ID NO: 42065 - protein, 14 aa, BK virus
GLKEHDFSPEEPEE

SEQ ID NO: 42066 - protein, 14 aa, BK virus
LKEHDFSPEEPEET

SEQ ID NO: 42067 - protein, 14 aa, BK virus
KEHDFSPEEPEETK

SEQ ID NO: 42068 - protein, 14 aa, BK virus
EHDFSPEEPEETKQ

SEQ ID NO: 42069 - protein, 14 aa, BK virus
HDFSPEEPEETKQV

SEQ ID NO: 42070 - protein, 14 aa, BK virus
DFSPEEPEETKQVS

SEQ ID NO: 42071 - protein, 14 aa, BK virus
FSPEEPEETKQVSW

SEQ ID NO: 42072 - protein, 14 aa, BK virus
SPEEPEETKQVSWK

SEQ ID NO: 42073 - protein, 14 aa, BK virus
PEEPEETKQVSWKL

SEQ ID NO: 42074 - protein, 14 aa, BK virus
EEPEETKQVSWKLI

SEQ ID NO: 42075 - protein, 14 aa, BK virus
EPEETKQVSWKLIT

SEQ ID NO: 42076 - protein, 14 aa, BK virus
PEETKQVSWKLITE

SEQ ID NO: 42077 - protein, 14 aa, BK virus
EETKQVSWKLITEY

SEQ ID NO: 42078 - protein, 14 aa, BK virus
ETKQVSWKLITEYA

SEQ ID NO: 42079 - protein, 14 aa, BK virus
TKQVSWKLITEYAV

SEQ ID NO: 42080 - protein, 14 aa, BK virus
KQVSWKLITEYAVE

SEQ ID NO: 42081 - protein, 14 aa, BK virus
QVSWKLITEYAVET

SEQ ID NO: 42082 - protein, 14 aa, BK virus
VSWKLITEYAVETK

SEQ ID NO: 42083 - protein, 14 aa, BK virus
SWKLITEYAVETKC

SEQ ID NO: 42084 - protein, 14 aa, BK virus
WKLITEYAVETKCE

SEQ ID NO: 42085 - protein, 14 aa, BK virus
KLITEYAVETKCED

SEQ ID NO: 42086 - protein, 14 aa, BK virus
LITEYAVETKCEDV

SEQ ID NO: 42087 - protein, 14 aa, BK virus
ITEYAVETKCEDVF

SEQ ID NO: 42088 - protein, 14 aa, BK virus
TEYAVETKCEDVFL

SEQ ID NO: 42089 - protein, 14 aa, BK virus
EYAVETKCEDVFLL

SEQ ID NO: 42090 - protein, 14 aa, BK virus
YAVETKCEDVFLLL

SEQ ID NO: 42091 - protein, 14 aa, BK virus
AVETKCEDVFLLLG

SEQ ID NO: 42092 - protein, 14 aa, BK virus
VETKCEDVFLLLGM

SEQ ID NO: 42093 - protein, 14 aa, BK virus
ETKCEDVFLLLGMY

SEQ ID NO: 42094 - protein, 14 aa, BK virus
TKCEDVFLLLGMYL

SEQ ID NO: 42095 - protein, 14 aa, BK virus
KCEDVFLLLGMYLE

SEQ ID NO: 42096 - protein, 14 aa, BK virus
CEDVFLLLGMYLEF

SEQ ID NO: 42097 - protein, 14 aa, BK virus
EDVFLLLGMYLEFQ

SEQ ID NO: 42098 - protein, 14 aa, BK virus
DVFLLLGMYLEFQY

SEQ ID NO: 42099 - protein, 14 aa, BK virus
VFLLLGMYLEFQYN

SEQ ID NO: 42100 - protein, 14 aa, BK virus
FLLLGMYLEFQYNV

SEQ ID NO: 42101 - protein, 14 aa, BK virus
LLLGMYLEFQYNVE

SEQ ID NO: 42102 - protein, 14 aa, BK virus
LLGMYLEFQYNVEE

SEQ ID NO: 42103 - protein, 14 aa, BK virus
LGMYLEFQYNVEEC

SEQ ID NO: 42104 - protein, 14 aa, BK virus
GMYLEFQYNVEECK

SEQ ID NO: 42105 - protein, 14 aa, BK virus
MYLEFQYNVEECKK

SEQ ID NO: 42106 - protein, 14 aa, BK virus
YLEFQYNVEECKKC

SEQ ID NO: 42107 - protein, 14 aa, BK virus
LEFQYNVEECKKCQ

SEQ ID NO: 42108 - protein, 14 aa, BK virus
EFQYNVEECKKCQK

SEQ ID NO: 42109 - protein, 14 aa, BK virus
FQYNVEECKKCQKK

SEQ ID NO: 42110 - protein, 14 aa, BK virus
QYNVEECKKCQKKD

SEQ ID NO: 42111 - protein, 14 aa, BK virus
YNVEECKKCQKKDQ

SEQ ID NO: 42112 - protein, 14 aa, BK virus
NVEECKKCQKKDQP

SEQ ID NO: 42113 - protein, 14 aa, BK virus
VEECKKCQKKDQPY

SEQ ID NO: 42114 - protein, 14 aa, BK virus
EECKKCQKKDQPYH

SEQ ID NO: 42115 - protein, 14 aa, BK virus
ECKKCQKKDQPYHF

SEQ ID NO: 42116 - protein, 14 aa, BK virus
CKKCQKKDQPYHFK

SEQ ID NO: 42117 - protein, 14 aa, BK virus
KKCQKKDQPYHFKY

SEQ ID NO: 42118 - protein, 14 aa, BK virus
KCQKKDQPYHFKYH

SEQ ID NO: 42119 - protein, 14 aa, BK virus
CQKKDQPYHFKYHE

SEQ ID NO: 42120 - protein, 14 aa, BK virus
QKKDQPYHFKYHEK

SEQ ID NO: 42121 - protein, 14 aa, BK virus
KKDQPYHFKYHEKH

SEQ ID NO: 42122 - protein, 14 aa, BK virus
KDQPYHFKYHEKHF

SEQ ID NO: 42123 - protein, 14 aa, BK virus
DQPYHFKYHEKHFA

SEQ ID NO: 42124 - protein, 14 aa, BK virus
QPYHFKYHEKHFAN

SEQ ID NO: 42125 - protein, 14 aa, BK virus
PYHFKYHEKHFANA

SEQ ID NO: 42126 - protein, 14 aa, BK virus
YHFKYHEKHFANAI

SEQ ID NO: 42127 - protein, 14 aa, BK virus
HFKYHEKHFANAII

SEQ ID NO: 42128 - protein, 14 aa, BK virus
FKYHEKHFANAIIF

SEQ ID NO: 42129 - protein, 14 aa, BK virus
KYHEKHFANAIIFA

SEQ ID NO: 42130 - protein, 14 aa, BK virus
YHEKHFANAIIFAE

SEQ ID NO: 42131 - protein, 14 aa, BK virus
HEKHFANAIIFAES

SEQ ID NO: 42132 - protein, 14 aa, BK virus
EKHFANAIIFAESK

SEQ ID NO: 42133 - protein, 14 aa, BK virus
KHFANAIIFAESKN

SEQ ID NO: 42134 - protein, 14 aa, BK virus
HFANAIIFAESKNQ

SEQ ID NO: 42135 - protein, 14 aa, BK virus
FANAIIFAESKNQK

SEQ ID NO: 42136 - protein, 14 aa, BK virus
ANAIIFAESKNQKS

SEQ ID NO: 42137 - protein, 14 aa, BK virus
NAIIFAESKNQKSI

SEQ ID NO: 42138 - protein, 14 aa, BK virus
AIIFAESKNQKSIC

SEQ ID NO: 42139 - protein, 14 aa, BK virus
IIFAESKNQKSICQ

SEQ ID NO: 42140 - protein, 14 aa, BK virus
IFAESKNQKSICQQ

SEQ ID NO: 42141 - protein, 14 aa, BK virus
FAESKNQKSICQQA

SEQ ID NO: 42142 - protein, 14 aa, BK virus
AESKNQKSICQQAV

SEQ ID NO: 42143 - protein, 14 aa, BK virus
ESKNQKSICQQAVD

SEQ ID NO: 42144 - protein, 14 aa, BK virus
SKNQKSICQQAVDT

SEQ ID NO: 42145 - protein, 14 aa, BK virus
KNQKSICQQAVDTV

SEQ ID NO: 42146 - protein, 14 aa, BK virus
NQKSICQQAVDTVL

SEQ ID NO: 42147 - protein, 14 aa, BK virus
QKSICQQAVDTVLA

SEQ ID NO: 42148 - protein, 14 aa, BK virus
KSICQQAVDTVLAK

SEQ ID NO: 42149 - protein, 14 aa, BK virus
SICQQAVDTVLAKK

SEQ ID NO: 42150 - protein, 14 aa, BK virus
ICQQAVDTVLAKKR

SEQ ID NO: 42151 - protein, 14 aa, BK virus
CQQAVDTVLAKKRV

SEQ ID NO: 42152 - protein, 14 aa, BK virus
QQAVDTVLAKKRVD

SEQ ID NO: 42153 - protein, 14 aa, BK virus
QAVDTVLAKKRVDT

SEQ ID NO: 42154 - protein, 14 aa, BK virus
AVDTVLAKKRVDTL

SEQ ID NO: 42155 - protein, 14 aa, BK virus
VDTVLAKKRVDTLH

SEQ ID NO: 42156 - protein, 14 aa, BK virus
DTVLAKKRVDTLHM

SEQ ID NO: 42157 - protein, 14 aa, BK virus
TVLAKKRVDTLHMT

SEQ ID NO: 42158 - protein, 14 aa, BK virus
VLAKKRVDTLHMTR

SEQ ID NO: 42159 - protein, 14 aa, BK virus
LAKKRVDTLHMTRE

SEQ ID NO: 42160 - protein, 14 aa, BK virus
AKKRVDTLHMTREE

SEQ ID NO: 42161 - protein, 14 aa, BK virus
KKRVDTLHMTREEM

SEQ ID NO: 42162 - protein, 14 aa, BK virus
KRVDTLHMTREEML

SEQ ID NO: 42163 - protein, 14 aa, BK virus
RVDTLHMTREEMLT

SEQ ID NO: 42164 - protein, 14 aa, BK virus
VDTLHMTREEMLTE

SEQ ID NO: 42165 - protein, 14 aa, BK virus
DTLHMTREEMLTER

SEQ ID NO: 42166 - protein, 14 aa, BK virus
TLHMTREEMLTERF

SEQ ID NO: 42167 - protein, 14 aa, BK virus
LHMTREEMLTERFN

SEQ ID NO: 42168 - protein, 14 aa, BK virus
HMTREEMLTERFNH

SEQ ID NO: 42169 - protein, 14 aa, BK virus
MTREEMLTERFNHI

SEQ ID NO: 42170 - protein, 14 aa, BK virus
TREEMLTERFNHIL

SEQ ID NO: 42171 - protein, 14 aa, BK virus
REEMLTERFNHILD

SEQ ID NO: 42172 - protein, 14 aa, BK virus
EEMLTERFNHILDK

SEQ ID NO: 42173 - protein, 14 aa, BK virus
EMLTERFNHILDKM

SEQ ID NO: 42174 - protein, 14 aa, BK virus
MLTERFNHILDKMD

SEQ ID NO: 42175 - protein, 14 aa, BK virus
LTERFNHILDKMDL

SEQ ID NO: 42176 - protein, 14 aa, BK virus
TERFNHILDKMDLI

SEQ ID NO: 42177 - protein, 14 aa, BK virus
ERFNHILDKMDLIF

SEQ ID NO: 42178 - protein, 14 aa, BK virus
RFNHILDKMDLIFG

SEQ ID NO: 42179 - protein, 14 aa, BK virus
FNHILDKMDLIFGA

SEQ ID NO: 42180 - protein, 14 aa, BK virus
NHILDKMDLIFGAH

SEQ ID NO: 42181 - protein, 14 aa, BK virus
HILDKMDLIFGAHG

SEQ ID NO: 42182 - protein, 14 aa, BK virus
ILDKMDLIFGAHGN

SEQ ID NO: 42183 - protein, 14 aa, BK virus
LDKMDLIFGAHGNA

SEQ ID NO: 42184 - protein, 14 aa, BK virus
DKMDLIFGAHGNAV

SEQ ID NO: 42185 - protein, 14 aa, BK virus
KMDLIFGAHGNAVL

SEQ ID NO: 42186 - protein, 14 aa, BK virus
MDLIFGAHGNAVLE

SEQ ID NO: 42187 - protein, 14 aa, BK virus
DLIFGAHGNAVLEQ

SEQ ID NO: 42188 - protein, 14 aa, BK virus
LIFGAHGNAVLEQY

SEQ ID NO: 42189 - protein, 14 aa, BK virus
IFGAHGNAVLEQYM

SEQ ID NO: 42190 - protein, 14 aa, BK virus
FGAHGNAVLEQYMA

SEQ ID NO: 42191 - protein, 14 aa, BK virus
GAHGNAVLEQYMAG

SEQ ID NO: 42192 - protein, 14 aa, BK virus
AHGNAVLEQYMAGV

SEQ ID NO: 42193 - protein, 14 aa, BK virus
HGNAVLEQYMAGVA

SEQ ID NO: 42194 - protein, 14 aa, BK virus
GNAVLEQYMAGVAW

SEQ ID NO: 42195 - protein, 14 aa, BK virus
NAVLEQYMAGVAWL

SEQ ID NO: 42196 - protein, 14 aa, BK virus
AVLEQYMAGVAWLH

SEQ ID NO: 42197 - protein, 14 aa, BK virus
VLEQYMAGVAWLHC

SEQ ID NO: 42198 - protein, 14 aa, BK virus
LEQYMAGVAWLHCL

SEQ ID NO: 42199 - protein, 14 aa, BK virus
EQYMAGVAWLHCLL

SEQ ID NO: 42200 - protein, 14 aa, BK virus
QYMAGVAWLHCLLP

SEQ ID NO: 42201 - protein, 14 aa, BK virus
YMAGVAWLHCLLPK

SEQ ID NO: 42202 - protein, 14 aa, BK virus
MAGVAWLHCLLPKM

SEQ ID NO: 42203 - protein, 14 aa, BK virus
AGVAWLHCLLPKMD

SEQ ID NO: 42204 - protein, 14 aa, BK virus
GVAWLHCLLPKMDS

SEQ ID NO: 42205 - protein, 14 aa, BK virus
VAWLHCLLPKMDSV

SEQ ID NO: 42206 - protein, 14 aa, BK virus
AWLHCLLPKMDSVI

SEQ ID NO: 42207 - protein, 14 aa, BK virus
WLHCLLPKMDSVIF

SEQ ID NO: 42208 - protein, 14 aa, BK virus
LHCLLPKMDSVIFD

SEQ ID NO: 42209 - protein, 14 aa, BK virus
HCLLPKMDSVIFDF

SEQ ID NO: 42210 - protein, 14 aa, BK virus
CLLPKMDSVIFDFL

SEQ ID NO: 42211 - protein, 14 aa, BK virus
LLPKMDSVIFDFLH

SEQ ID NO: 42212 - protein, 14 aa, BK virus
LPKMDSVIFDFLHC

SEQ ID NO: 42213 - protein, 14 aa, BK virus
PKMDSVIFDFLHCI

SEQ ID NO: 42214 - protein, 14 aa, BK virus
KMDSVIFDFLHCIV

SEQ ID NO: 42215 - protein, 14 aa, BK virus
MDSVIFDFLHCIVF

SEQ ID NO: 42216 - protein, 14 aa, BK virus
DSVIFDFLHCIVFN

SEQ ID NO: 42217 - protein, 14 aa, BK virus
SVIFDFLHCIVFNV

SEQ ID NO: 42218 - protein, 14 aa, BK virus
VIFDFLHCIVFNVP

SEQ ID NO: 42219 - protein, 14 aa, BK virus
IFDFLHCIVFNVPK

SEQ ID NO: 42220 - protein, 14 aa, BK virus
FDFLHCIVFNVPKR

SEQ ID NO: 42221 - protein, 14 aa, BK virus
DFLHCIVFNVPKRR

SEQ ID NO: 42222 - protein, 14 aa, BK virus
FLHCIVFNVPKRRY

SEQ ID NO: 42223 - protein, 14 aa, BK virus
LHCIVFNVPKRRYW

SEQ ID NO: 42224 - protein, 14 aa, BK virus
HCIVFNVPKRRYWL

SEQ ID NO: 42225 - protein, 14 aa, BK virus
CIVFNVPKRRYWLF

SEQ ID NO: 42226 - protein, 14 aa, BK virus
IVFNVPKRRYWLFK

SEQ ID NO: 42227 - protein, 14 aa, BK virus
VFNVPKRRYWLFKG

SEQ ID NO: 42228 - protein, 14 aa, BK virus
FNVPKRRYWLFKGP

SEQ ID NO: 42229 - protein, 14 aa, BK virus
NVPKRRYWLFKGPI

SEQ ID NO: 42230 - protein, 14 aa, BK virus
VPKRRYWLFKGPID

SEQ ID NO: 42231 - protein, 14 aa, BK virus
PKRRYWLFKGPIDS

SEQ ID NO: 42232 - protein, 14 aa, BK virus
KRRYWLFKGPIDSG

SEQ ID NO: 42233 - protein, 14 aa, BK virus
RRYWLFKGPIDSGK

SEQ ID NO: 42234 - protein, 14 aa, BK virus
RYWLFKGPIDSGKT

SEQ ID NO: 42235 - protein, 14 aa, BK virus
YWLFKGPIDSGKTT

SEQ ID NO: 42236 - protein, 14 aa, BK virus
WLFKGPIDSGKTTL

SEQ ID NO: 42237 - protein, 14 aa, BK virus
LFKGPIDSGKTTLA

SEQ ID NO: 42238 - protein, 14 aa, BK virus
FKGPIDSGKTTLAA

SEQ ID NO: 42239 - protein, 14 aa, BK virus
KGPIDSGKTTLAAG

SEQ ID NO: 42240 - protein, 14 aa, BK virus
GPIDSGKTTLAAGL

SEQ ID NO: 42241 - protein, 14 aa, BK virus
PIDSGKTTLAAGLL

SEQ ID NO: 42242 - protein, 14 aa, BK virus
IDSGKTTLAAGLLD

SEQ ID NO: 42243 - protein, 14 aa, BK virus
DSGKTTLAAGLLDL

SEQ ID NO: 42244 - protein, 14 aa, BK virus
SGKTTLAAGLLDLC

SEQ ID NO: 42245 - protein, 14 aa, BK virus
GKTTLAAGLLDLCG

SEQ ID NO: 42246 - protein, 14 aa, BK virus
KTTLAAGLLDLCGG

SEQ ID NO: 42247 - protein, 14 aa, BK virus
TTLAAGLLDLCGGK

SEQ ID NO: 42248 - protein, 14 aa, BK virus
TLAAGLLDLCGGKA

SEQ ID NO: 42249 - protein, 14 aa, BK virus
LAAGLLDLCGGKAL

SEQ ID NO: 42250 - protein, 14 aa, BK virus
AAGLLDLCGGKALN

SEQ ID NO: 42251 - protein, 14 aa, BK virus
AGLLDLCGGKALNV

SEQ ID NO: 42252 - protein, 14 aa, BK virus
GLLDLCGGKALNVN

SEQ ID NO: 42253 - protein, 14 aa, BK virus
LLDLCGGKALNVNL

SEQ ID NO: 42254 - protein, 14 aa, BK virus
LDLCGGKALNVNLP

SEQ ID NO: 42255 - protein, 14 aa, BK virus
DLCGGKALNVNLPM

SEQ ID NO: 42256 - protein, 14 aa, BK virus
LCGGKALNVNLPME

SEQ ID NO: 42257 - protein, 14 aa, BK virus
CGGKALNVNLPMER

SEQ ID NO: 42258 - protein, 14 aa, BK virus
GGKALNVNLPMERL

SEQ ID NO: 42259 - protein, 14 aa, BK virus
GKALNVNLPMERLT

SEQ ID NO: 42260 - protein, 14 aa, BK virus
KALNVNLPMERLTF

SEQ ID NO: 42261 - protein, 14 aa, BK virus
ALNVNLPMERLTFE

SEQ ID NO: 42262 - protein, 14 aa, BK virus
LNVNLPMERLTFEL

SEQ ID NO: 42263 - protein, 14 aa, BK virus
NVNLPMERLTFELG

SEQ ID NO: 42264 - protein, 14 aa, BK virus
VNLPMERLTFELGV

SEQ ID NO: 42265 - protein, 14 aa, BK virus
NLPMERLTFELGVA

SEQ ID NO: 42266 - protein, 14 aa, BK virus
LPMERLTFELGVAI

SEQ ID NO: 42267 - protein, 14 aa, BK virus
PMERLTFELGVAID

SEQ ID NO: 42268 - protein, 14 aa, BK virus
MERLTFELGVAIDQ

SEQ ID NO: 42269 - protein, 14 aa, BK virus
ERLTFELGVAIDQY

SEQ ID NO: 42270 - protein, 14 aa, BK virus
RLTFELGVAIDQYM

SEQ ID NO: 42271 - protein, 14 aa, BK virus
LTFELGVAIDQYMV

SEQ ID NO: 42272 - protein, 14 aa, BK virus
TFELGVAIDQYMVV

SEQ ID NO: 42273 - protein, 14 aa, BK virus
FELGVAIDQYMVVF

SEQ ID NO: 42274 - protein, 14 aa, BK virus
ELGVAIDQYMVVFE

SEQ ID NO: 42275 - protein, 14 aa, BK virus
LGVAIDQYMVVFED

SEQ ID NO: 42276 - protein, 14 aa, BK virus
GVAIDQYMVVFEDV

SEQ ID NO: 42277 - protein, 14 aa, BK virus
VAIDQYMVVFEDVK

SEQ ID NO: 42278 - protein, 14 aa, BK virus
AIDQYMVVFEDVKG

SEQ ID NO: 42279 - protein, 14 aa, BK virus
IDQYMVVFEDVKGT

SEQ ID NO: 42280 - protein, 14 aa, BK virus
DQYMVVFEDVKGTG

SEQ ID NO: 42281 - protein, 14 aa, BK virus
QYMVVFEDVKGTGA

SEQ ID NO: 42282 - protein, 14 aa, BK virus
YMVVFEDVKGTGAE

SEQ ID NO: 42283 - protein, 14 aa, BK virus
MVVFEDVKGTGAES

SEQ ID NO: 42284 - protein, 14 aa, BK virus
VVFEDVKGTGAESK

SEQ ID NO: 42285 - protein, 14 aa, BK virus
VFEDVKGTGAESKD

SEQ ID NO: 42286 - protein, 14 aa, BK virus
FEDVKGTGAESKDL

SEQ ID NO: 42287 - protein, 14 aa, BK virus
EDVKGTGAESKDLP

SEQ ID NO: 42288 - protein, 14 aa, BK virus
DVKGTGAESKDLPS

SEQ ID NO: 42289 - protein, 14 aa, BK virus
VKGTGAESKDLPSG

SEQ ID NO: 42290 - protein, 14 aa, BK virus
KGTGAESKDLPSGH

SEQ ID NO: 42291 - protein, 14 aa, BK virus
GTGAESKDLPSGHG

SEQ ID NO: 42292 - protein, 14 aa, BK virus
TGAESKDLPSGHGI

SEQ ID NO: 42293 - protein, 14 aa, BK virus
GAESKDLPSGHGIN

SEQ ID NO: 42294 - protein, 14 aa, BK virus
AESKDLPSGHGINN

SEQ ID NO: 42295 - protein, 14 aa, BK virus
ESKDLPSGHGINNL

SEQ ID NO: 42296 - protein, 14 aa, BK virus
SKDLPSGHGINNLD

SEQ ID NO: 42297 - protein, 14 aa, BK virus
KDLPSGHGINNLDS

SEQ ID NO: 42298 - protein, 14 aa, BK virus
DLPSGHGINNLDSL

SEQ ID NO: 42299 - protein, 14 aa, BK virus
LPSGHGINNLDSLR

SEQ ID NO: 42300 - protein, 14 aa, BK virus
PSGHGINNLDSLRD

SEQ ID NO: 42301 - protein, 14 aa, BK virus
SGHGINNLDSLRDY

SEQ ID NO: 42302 - protein, 14 aa, BK virus
GHGINNLDSLRDYL

SEQ ID NO: 42303 - protein, 14 aa, BK virus
HGINNLDSLRDYLD

SEQ ID NO: 42304 - protein, 14 aa, BK virus
GINNLDSLRDYLDG

SEQ ID NO: 42305 - protein, 14 aa, BK virus
INNLDSLRDYLDGS

SEQ ID NO: 42306 - protein, 14 aa, BK virus
NNLDSLRDYLDGSV

SEQ ID NO: 42307 - protein, 14 aa, BK virus
NLDSLRDYLDGSVK

SEQ ID NO: 42308 - protein, 14 aa, BK virus
LDSLRDYLDGSVKV

SEQ ID NO: 42309 - protein, 14 aa, BK virus
DSLRDYLDGSVKVN

SEQ ID NO: 42310 - protein, 14 aa, BK virus
SLRDYLDGSVKVNL

SEQ ID NO: 42311 - protein, 14 aa, BK virus
LRDYLDGSVKVNLE

SEQ ID NO: 42312 - protein, 14 aa, BK virus
RDYLDGSVKVNLEK

SEQ ID NO: 42313 - protein, 14 aa, BK virus
DYLDGSVKVNLEKK

SEQ ID NO: 42314 - protein, 14 aa, BK virus
YLDGSVKVNLEKKH

SEQ ID NO: 42315 - protein, 14 aa, BK virus
LDGSVKVNLEKKHL

SEQ ID NO: 42316 - protein, 14 aa, BK virus
DGSVKVNLEKKHLN

SEQ ID NO: 42317 - protein, 14 aa, BK virus
GSVKVNLEKKHLNK

SEQ ID NO: 42318 - protein, 14 aa, BK virus
SVKVNLEKKHLNKR

SEQ ID NO: 42319 - protein, 14 aa, BK virus
VKVNLEKKHLNKRT

SEQ ID NO: 42320 - protein, 14 aa, BK virus
KVNLEKKHLNKRTQ

SEQ ID NO: 42321 - protein, 14 aa, BK virus
VNLEKKHLNKRTQI

SEQ ID NO: 42322 - protein, 14 aa, BK virus
NLEKKHLNKRTQIF

SEQ ID NO: 42323 - protein, 14 aa, BK virus
LEKKHLNKRTQIFP

SEQ ID NO: 42324 - protein, 14 aa, BK virus
EKKHLNKRTQIFPP

SEQ ID NO: 42325 - protein, 14 aa, BK virus
KKHLNKRTQIFPPG

SEQ ID NO: 42326 - protein, 14 aa, BK virus
KHLNKRTQIFPPGL

SEQ ID NO: 42327 - protein, 14 aa, BK virus
HLNKRTQIFPPGLV

SEQ ID NO: 42328 - protein, 14 aa, BK virus
LNKRTQIFPPGLVT

SEQ ID NO: 42329 - protein, 14 aa, BK virus
NKRTQIFPPGLVTM

SEQ ID NO: 42330 - protein, 14 aa, BK virus
KRTQIFPPGLVTMN

SEQ ID NO: 42331 - protein, 14 aa, BK virus
RTQIFPPGLVTMNE

SEQ ID NO: 42332 - protein, 14 aa, BK virus
TQIFPPGLVTMNEY

SEQ ID NO: 42333 - protein, 14 aa, BK virus
QIFPPGLVTMNEYP

SEQ ID NO: 42334 - protein, 14 aa, BK virus
IFPPGLVTMNEYPV

SEQ ID NO: 42335 - protein, 14 aa, BK virus
FPPGLVTMNEYPVP

SEQ ID NO: 42336 - protein, 14 aa, BK virus
PPGLVTMNEYPVPK

SEQ ID NO: 42337 - protein, 14 aa, BK virus
PGLVTMNEYPVPKT

SEQ ID NO: 42338 - protein, 14 aa, BK virus
GLVTMNEYPVPKTL

SEQ ID NO: 42339 - protein, 14 aa, BK virus
LVTMNEYPVPKTLQ

SEQ ID NO: 42340 - protein, 14 aa, BK virus
VTMNEYPVPKTLQA

SEQ ID NO: 42341 - protein, 14 aa, BK virus
TMNEYPVPKTLQAR

SEQ ID NO: 42342 - protein, 14 aa, BK virus
MNEYPVPKTLQARF

SEQ ID NO: 42343 - protein, 14 aa, BK virus
NEYPVPKTLQARFV

SEQ ID NO: 42344 - protein, 14 aa, BK virus
EYPVPKTLQARFVR

SEQ ID NO: 42345 - protein, 14 aa, BK virus
YPVPKTLQARFVRQ

SEQ ID NO: 42346 - protein, 14 aa, BK virus
PVPKTLQARFVRQI

SEQ ID NO: 42347 - protein, 14 aa, BK virus
VPKTLQARFVRQID

SEQ ID NO: 42348 - protein, 14 aa, BK virus
PKTLQARFVRQIDF

SEQ ID NO: 42349 - protein, 14 aa, BK virus
KTLQARFVRQIDFR

SEQ ID NO: 42350 - protein, 14 aa, BK virus
TLQARFVRQIDFRP

SEQ ID NO: 42351 - protein, 14 aa, BK virus
LQARFVRQIDFRPK

SEQ ID NO: 42352 - protein, 14 aa, BK virus
QARFVRQIDFRPKI

SEQ ID NO: 42353 - protein, 14 aa, BK virus
ARFVRQIDFRPKIY

SEQ ID NO: 42354 - protein, 14 aa, BK virus
RFVRQIDFRPKIYL

SEQ ID NO: 42355 - protein, 14 aa, BK virus
FVRQIDFRPKIYLR

SEQ ID NO: 42356 - protein, 14 aa, BK virus
VRQIDFRPKIYLRK

SEQ ID NO: 42357 - protein, 14 aa, BK virus
RQIDFRPKIYLRKS

SEQ ID NO: 42358 - protein, 14 aa, BK virus
QIDFRPKIYLRKSL

SEQ ID NO: 42359 - protein, 14 aa, BK virus
IDFRPKIYLRKSLQ

SEQ ID NO: 42360 - protein, 14 aa, BK virus
DFRPKIYLRKSLQN

SEQ ID NO: 42361 - protein, 14 aa, BK virus
FRPKIYLRKSLQNS

SEQ ID NO: 42362 - protein, 14 aa, BK virus
RPKIYLRKSLQNSE

SEQ ID NO: 42363 - protein, 14 aa, BK virus
PKIYLRKSLQNSEF

SEQ ID NO: 42364 - protein, 14 aa, BK virus
KIYLRKSLQNSEFL

SEQ ID NO: 42365 - protein, 14 aa, BK virus
IYLRKSLQNSEFLL

SEQ ID NO: 42366 - protein, 14 aa, BK virus
YLRKSLQNSEFLLE

SEQ ID NO: 42367 - protein, 14 aa, BK virus
LRKSLQNSEFLLEK

SEQ ID NO: 42368 - protein, 14 aa, BK virus
RKSLQNSEFLLEKR

SEQ ID NO: 42369 - protein, 14 aa, BK virus
KSLQNSEFLLEKRI

SEQ ID NO: 42370 - protein, 14 aa, BK virus
SLQNSEFLLEKRIL

SEQ ID NO: 42371 - protein, 14 aa, BK virus
LQNSEFLLEKRILQ

SEQ ID NO: 42372 - protein, 14 aa, BK virus
QNSEFLLEKRILQS

SEQ ID NO: 42373 - protein, 14 aa, BK virus
NSEFLLEKRILQSG

SEQ ID NO: 42374 - protein, 14 aa, BK virus
SEFLLEKRILQSGM

SEQ ID NO: 42375 - protein, 14 aa, BK virus
EFLLEKRILQSGMT

SEQ ID NO: 42376 - protein, 14 aa, BK virus
FLLEKRILQSGMTL

SEQ ID NO: 42377 - protein, 14 aa, BK virus
LLEKRILQSGMTLL

SEQ ID NO: 42378 - protein, 14 aa, BK virus
LEKRILQSGMTLLL

SEQ ID NO: 42379 - protein, 14 aa, BK virus
EKRILQSGMTLLLL

SEQ ID NO: 42380 - protein, 14 aa, BK virus
KRILQSGMTLLLLL

SEQ ID NO: 42381 - protein, 14 aa, BK virus
RILQSGMTLLLLLI

SEQ ID NO: 42382 - protein, 14 aa, BK virus
ILQSGMTLLLLLIW

SEQ ID NO: 42383 - protein, 14 aa, BK virus
LQSGMTLLLLLIWF

SEQ ID NO: 42384 - protein, 14 aa, BK virus
QSGMTLLLLLIWFR

SEQ ID NO: 42385 - protein, 14 aa, BK virus
SGMTLLLLLIWFRP

SEQ ID NO: 42386 - protein, 14 aa, BK virus
GMTLLLLLIWFRPV

SEQ ID NO: 42387 - protein, 14 aa, BK virus
MTLLLLLIWFRPVA

SEQ ID NO: 42388 - protein, 14 aa, BK virus
TLLLLLIWFRPVAD

SEQ ID NO: 42389 - protein, 14 aa, BK virus
LLLLLIWFRPVADF

SEQ ID NO: 42390 - protein, 14 aa, BK virus
LLLLIWFRPVADFA

SEQ ID NO: 42391 - protein, 14 aa, BK virus
LLLIWFRPVADFAT

SEQ ID NO: 42392 - protein, 14 aa, BK virus
LLIWFRPVADFATD

SEQ ID NO: 42393 - protein, 14 aa, BK virus
LIWFRPVADFATDI

SEQ ID NO: 42394 - protein, 14 aa, BK virus
IWFRPVADFATDIQ

SEQ ID NO: 42395 - protein, 14 aa, BK virus
WFRPVADFATDIQS

SEQ ID NO: 42396 - protein, 14 aa, BK virus
FRPVADFATDIQSR

SEQ ID NO: 42397 - protein, 14 aa, BK virus
RPVADFATDIQSRI

SEQ ID NO: 42398 - protein, 14 aa, BK virus
PVADFATDIQSRIV

SEQ ID NO: 42399 - protein, 14 aa, BK virus
VADFATDIQSRIVE

SEQ ID NO: 42400 - protein, 14 aa, BK virus
ADFATDIQSRIVEW

SEQ ID NO: 42401 - protein, 14 aa, BK virus
DFATDIQSRIVEWK

SEQ ID NO: 42402 - protein, 14 aa, BK virus
FATDIQSRIVEWKE

SEQ ID NO: 42403 - protein, 14 aa, BK virus
ATDIQSRIVEWKER

SEQ ID NO: 42404 - protein, 14 aa, BK virus
TDIQSRIVEWKERL

SEQ ID NO: 42405 - protein, 14 aa, BK virus
DIQSRIVEWKERLD

SEQ ID NO: 42406 - protein, 14 aa, BK virus
IQSRIVEWKERLDS

SEQ ID NO: 42407 - protein, 14 aa, BK virus
QSRIVEWKERLDSE

SEQ ID NO: 42408 - protein, 14 aa, BK virus
SRIVEWKERLDSEI

SEQ ID NO: 42409 - protein, 14 aa, BK virus
RIVEWKERLDSEIS

SEQ ID NO: 42410 - protein, 14 aa, BK virus
IVEWKERLDSEISM

SEQ ID NO: 42411 - protein, 14 aa, BK virus
VEWKERLDSEISMY

SEQ ID NO: 42412 - protein, 14 aa, BK virus
EWKERLDSEISMYT

SEQ ID NO: 42413 - protein, 14 aa, BK virus
WKERLDSEISMYTF

SEQ ID NO: 42414 - protein, 14 aa, BK virus
KERLDSEISMYTFS

SEQ ID NO: 42415 - protein, 14 aa, BK virus
ERLDSEISMYTFSR

SEQ ID NO: 42416 - protein, 14 aa, BK virus
RLDSEISMYTFSRM

SEQ ID NO: 42417 - protein, 14 aa, BK virus
LDSEISMYTFSRMK

SEQ ID NO: 42418 - protein, 14 aa, BK virus
DSEISMYTFSRMKY

SEQ ID NO: 42419 - protein, 14 aa, BK virus
SEISMYTFSRMKYN

SEQ ID NO: 42420 - protein, 14 aa, BK virus
EISMYTFSRMKYNI

SEQ ID NO: 42421 - protein, 14 aa, BK virus
ISMYTFSRMKYNIC

SEQ ID NO: 42422 - protein, 14 aa, BK virus
SMYTFSRMKYNICM

SEQ ID NO: 42423 - protein, 14 aa, BK virus
MYTFSRMKYNICMG

SEQ ID NO: 42424 - protein, 14 aa, BK virus
YTFSRMKYNICMGK

SEQ ID NO: 42425 - protein, 14 aa, BK virus
TFSRMKYNICMGKC

SEQ ID NO: 42426 - protein, 14 aa, BK virus
FSRMKYNICMGKCI

SEQ ID NO: 42427 - protein, 14 aa, BK virus
SRMKYNICMGKCIL

SEQ ID NO: 42428 - protein, 14 aa, BK virus
RMKYNICMGKCILD

SEQ ID NO: 42429 - protein, 14 aa, BK virus
MKYNICMGKCILDI

SEQ ID NO: 42430 - protein, 14 aa, BK virus
KYNICMGKCILDIT

SEQ ID NO: 42431 - protein, 14 aa, BK virus
YNICMGKCILDITR

SEQ ID NO: 42432 - protein, 14 aa, BK virus
NICMGKCILDITRE

SEQ ID NO: 42433 - protein, 14 aa, BK virus
ICMGKCILDITREE

SEQ ID NO: 42434 - protein, 14 aa, BK virus
CMGKCILDITREED

SEQ ID NO: 42435 - protein, 14 aa, BK virus
MGKCILDITREEDS

SEQ ID NO: 42436 - protein, 14 aa, BK virus
GKCILDITREEDSE

SEQ ID NO: 42437 - protein, 14 aa, BK virus
KCILDITREEDSET

SEQ ID NO: 42438 - protein, 14 aa, BK virus
CILDITREEDSETE

SEQ ID NO: 42439 - protein, 14 aa, BK virus
ILDITREEDSETED

SEQ ID NO: 42440 - protein, 14 aa, BK virus
LDITREEDSETEDS

SEQ ID NO: 42441 - protein, 14 aa, BK virus
DITREEDSETEDSG

SEQ ID NO: 42442 - protein, 14 aa, BK virus
ITREEDSETEDSGH

SEQ ID NO: 42443 - protein, 14 aa, BK virus
TREEDSETEDSGHG

SEQ ID NO: 42444 - protein, 14 aa, BK virus
REEDSETEDSGHGS

SEQ ID NO: 42445 - protein, 14 aa, BK virus
EEDSETEDSGHGSS

SEQ ID NO: 42446 - protein, 14 aa, BK virus
EDSETEDSGHGSST

SEQ ID NO: 42447 - protein, 14 aa, BK virus
DSETEDSGHGSSTE

SEQ ID NO: 42448 - protein, 14 aa, BK virus
SETEDSGHGSSTES

SEQ ID NO: 42449 - protein, 14 aa, BK virus
ETEDSGHGSSTESQ

SEQ ID NO: 42450 - protein, 14 aa, BK virus
TEDSGHGSSTESQS

SEQ ID NO: 42451 - protein, 14 aa, BK virus
EDSGHGSSTESQSQ

SEQ ID NO: 42452 - protein, 14 aa, BK virus
DSGHGSSTESQSQC

SEQ ID NO: 42453 - protein, 14 aa, BK virus
SGHGSSTESQSQCS

SEQ ID NO: 42454 - protein, 14 aa, BK virus
GHGSSTESQSQCSS

SEQ ID NO: 42455 - protein, 14 aa, BK virus
HGSSTESQSQCSSQ

SEQ ID NO: 42456 - protein, 14 aa, BK virus
GSSTESQSQCSSQV

SEQ ID NO: 42457 - protein, 14 aa, BK virus
SSTESQSQCSSQVS

SEQ ID NO: 42458 - protein, 14 aa, BK virus
STESQSQCSSQVSD

SEQ ID NO: 42459 - protein, 14 aa, BK virus
TESQSQCSSQVSDT

SEQ ID NO: 42460 - protein, 14 aa, BK virus
ESQSQCSSQVSDTS

SEQ ID NO: 42461 - protein, 14 aa, BK virus
SQSQCSSQVSDTSA

SEQ ID NO: 42462 - protein, 14 aa, BK virus
QSQCSSQVSDTSAP

SEQ ID NO: 42463 - protein, 14 aa, BK virus
SQCSSQVSDTSAPA

SEQ ID NO: 42464 - protein, 14 aa, BK virus
QCSSQVSDTSAPAE

SEQ ID NO: 42465 - protein, 14 aa, BK virus
CSSQVSDTSAPAED

SEQ ID NO: 42466 - protein, 14 aa, BK virus
SSQVSDTSAPAEDS

SEQ ID NO: 42467 - protein, 14 aa, BK virus
SQVSDTSAPAEDSQ

SEQ ID NO: 42468 - protein, 14 aa, BK virus
QVSDTSAPAEDSQR

SEQ ID NO: 42469 - protein, 14 aa, BK virus
VSDTSAPAEDSQRS

SEQ ID NO: 42470 - protein, 14 aa, BK virus
SDTSAPAEDSQRSD

SEQ ID NO: 42471 - protein, 14 aa, BK virus
DTSAPAEDSQRSDP

SEQ ID NO: 42472 - protein, 14 aa, BK virus
TSAPAEDSQRSDPH

SEQ ID NO: 42473 - protein, 14 aa, BK virus
SAPAEDSQRSDPHS

SEQ ID NO: 42474 - protein, 14 aa, BK virus
APAEDSQRSDPHSQ

SEQ ID NO: 42475 - protein, 14 aa, BK virus
PAEDSQRSDPHSQE

SEQ ID NO: 42476 - protein, 14 aa, BK virus
AEDSQRSDPHSQEL

SEQ ID NO: 42477 - protein, 14 aa, BK virus
EDSQRSDPHSQELH

SEQ ID NO: 42478 - protein, 14 aa, BK virus
DSQRSDPHSQELHL

SEQ ID NO: 42479 - protein, 14 aa, BK virus
SQRSDPHSQELHLC

SEQ ID NO: 42480 - protein, 14 aa, BK virus
QRSDPHSQELHLCK

SEQ ID NO: 42481 - protein, 14 aa, BK virus
RSDPHSQELHLCKG

SEQ ID NO: 42482 - protein, 14 aa, BK virus
SDPHSQELHLCKGF

SEQ ID NO: 42483 - protein, 14 aa, BK virus
DPHSQELHLCKGFQ

SEQ ID NO: 42484 - protein, 14 aa, BK virus
PHSQELHLCKGFQC

SEQ ID NO: 42485 - protein, 14 aa, BK virus
HSQELHLCKGFQCF

SEQ ID NO: 42486 - protein, 14 aa, BK virus
SQELHLCKGFQCFK

SEQ ID NO: 42487 - protein, 14 aa, BK virus
QELHLCKGFQCFKR

SEQ ID NO: 42488 - protein, 14 aa, BK virus
ELHLCKGFQCFKRP

SEQ ID NO: 42489 - protein, 14 aa, BK virus
LHLCKGFQCFKRPK

SEQ ID NO: 42490 - protein, 14 aa, BK virus
HLCKGFQCFKRPKT

SEQ ID NO: 42491 - protein, 14 aa, BK virus
LCKGFQCFKRPKTP

SEQ ID NO: 42492 - protein, 14 aa, BK virus
CKGFQCFKRPKTPP

SEQ ID NO: 42493 - protein, 14 aa, BK virus
KGFQCFKRPKTPPP

SEQ ID NO: 42494 - protein, 14 aa, BK virus
GFQCFKRPKTPPPK

SEQ ID NO: 42495 - protein, 14 aa, BK virus
MYMYNKSTCLKHFG

SEQ ID NO: 42496 - protein, 14 aa, BK virus
YMYNKSTCLKHFGL

SEQ ID NO: 42497 - protein, 14 aa, BK virus
MYNKSTCLKHFGLQ

SEQ ID NO: 42498 - protein, 14 aa, BK virus
YNKSTCLKHFGLQL

SEQ ID NO: 42499 - protein, 14 aa, BK virus
NKSTCLKHFGLQLS

SEQ ID NO: 42500 - protein, 14 aa, BK virus
KSTCLKHFGLQLSL

SEQ ID NO: 42501 - protein, 14 aa, BK virus
STCLKHFGLQLSLF

SEQ ID NO: 42502 - protein, 14 aa, BK virus
TCLKHFGLQLSLFV

SEQ ID NO: 42503 - protein, 14 aa, BK virus
CLKHFGLQLSLFVN

SEQ ID NO: 42504 - protein, 14 aa, BK virus
LKHFGLQLSLFVNI

SEQ ID NO: 42505 - protein, 14 aa, BK virus
KHFGLQLSLFVNIS

SEQ ID NO: 42506 - protein, 14 aa, BK virus
HFGLQLSLFVNISY

SEQ ID NO: 42507 - protein, 14 aa, BK virus
FGLQLSLFVNISYH

SEQ ID NO: 42508 - protein, 14 aa, BK virus
GLQLSLFVNISYHI

SEQ ID NO: 42509 - protein, 14 aa, BK virus
LQLSLFVNISYHIW

SEQ ID NO: 42510 - protein, 14 aa, BK virus
QLSLFVNISYHIWV

SEQ ID NO: 42511 - protein, 14 aa, BK virus
LSLFVNISYHIWVP

SEQ ID NO: 42512 - protein, 14 aa, BK virus
SLFVNISYHIWVPW

SEQ ID NO: 42513 - protein, 14 aa, BK virus
LFVNISYHIWVPWK

SEQ ID NO: 42514 - protein, 14 aa, BK virus
FVNISYHIWVPWKS

SEQ ID NO: 42515 - protein, 14 aa, BK virus
VNISYHIWVPWKSF

SEQ ID NO: 42516 - protein, 14 aa, BK virus
NISYHIWVPWKSFC

SEQ ID NO: 42517 - protein, 14 aa, BK virus
ISYHIWVPWKSFCA

SEQ ID NO: 42518 - protein, 14 aa, BK virus
SYHIWVPWKSFCAI

SEQ ID NO: 42519 - protein, 14 aa, BK virus
YHIWVPWKSFCAIK

SEQ ID NO: 42520 - protein, 14 aa, BK virus
HIWVPWKSFCAIKH

SEQ ID NO: 42521 - protein, 14 aa, BK virus
IWVPWKSFCAIKHP

SEQ ID NO: 42522 - protein, 14 aa, BK virus
WVPWKSFCAIKHPN

SEQ ID NO: 42523 - protein, 14 aa, BK virus
VPWKSFCAIKHPNL

SEQ ID NO: 42524 - protein, 14 aa, BK virus
PWKSFCAIKHPNLF

SEQ ID NO: 42525 - protein, 14 aa, BK virus
WKSFCAIKHPNLFY

SEQ ID NO: 42526 - protein, 14 aa, BK virus
KSFCAIKHPNLFYL

SEQ ID NO: 42527 - protein, 14 aa, BK virus
SFCAIKHPNLFYLG

SEQ ID NO: 42528 - protein, 14 aa, BK virus
FCAIKHPNLFYLGF

SEQ ID NO: 42529 - protein, 14 aa, BK virus
CAIKHPNLFYLGFH

SEQ ID NO: 42530 - protein, 14 aa, BK virus
AIKHPNLFYLGFHT

SEQ ID NO: 42531 - protein, 14 aa, BK virus
IKHPNLFYLGFHTI

SEQ ID NO: 42532 - protein, 14 aa, BK virus
KHPNLFYLGFHTIH

SEQ ID NO: 42533 - protein, 14 aa, BK virus
HPNLFYLGFHTIHR

SEQ ID NO: 42534 - protein, 14 aa, BK virus
PNLFYLGFHTIHRL

SEQ ID NO: 42535 - protein, 14 aa, BK virus
NLFYLGFHTIHRLP

SEQ ID NO: 42536 - protein, 14 aa, BK virus
LFYLGFHTIHRLPI

SEQ ID NO: 42537 - protein, 14 aa, BK virus
FYLGFHTIHRLPIH

SEQ ID NO: 42538 - protein, 14 aa, BK virus
YLGFHTIHRLPIHS

SEQ ID NO: 42539 - protein, 14 aa, BK virus
LGFHTIHRLPIHSL

SEQ ID NO: 42540 - protein, 14 aa, BK virus
GFHTIHRLPIHSLG

SEQ ID NO: 42541 - protein, 14 aa, BK virus
FHTIHRLPIHSLGS

SEQ ID NO: 42542 - protein, 14 aa, BK virus
HTIHRLPIHSLGSP

SEQ ID NO: 42543 - protein, 14 aa, BK virus
TIHRLPIHSLGSPV

SEQ ID NO: 42544 - protein, 14 aa, BK virus
IHRLPIHSLGSPVY

SEQ ID NO: 42545 - protein, 14 aa, BK virus
HRLPIHSLGSPVYK

SEQ ID NO: 42546 - protein, 14 aa, BK virus
RLPIHSLGSPVYKV

SEQ ID NO: 42547 - protein, 14 aa, BK virus
LPIHSLGSPVYKVT

SEQ ID NO: 42548 - protein, 14 aa, BK virus
QKGNWVRILYRSFS

SEQ ID NO: 42549 - protein, 14 aa, BK virus
KGNWVRILYRSFSQ

SEQ ID NO: 42550 - protein, 14 aa, BK virus
GNWVRILYRSFSQA

SEQ ID NO: 42551 - protein, 14 aa, BK virus
NWVRILYRSFSQAD

SEQ ID NO: 42552 - protein, 14 aa, BK virus
WVRILYRSFSQADL

SEQ ID NO: 42553 - protein, 14 aa, BK virus
VRILYRSFSQADLK

SEQ ID NO: 42554 - protein, 14 aa, BK virus
RILYRSFSQADLKI

SEQ ID NO: 42555 - protein, 14 aa, BK virus
ILYRSFSQADLKIS

SEQ ID NO: 42556 - protein, 14 aa, BK virus
LYRSFSQADLKISC

SEQ ID NO: 42557 - protein, 14 aa, BK virus
YRSFSQADLKISCK

SEQ ID NO: 42558 - protein, 14 aa, BK virus
RSFSQADLKISCKA

SEQ ID NO: 42559 - protein, 14 aa, BK virus
SFSQADLKISCKAS

SEQ ID NO: 42560 - protein, 14 aa, BK virus
FSQADLKISCKASP

SEQ ID NO: 42561 - protein, 14 aa, BK virus
SQADLKISCKASPL

SEQ ID NO: 42562 - protein, 14 aa, BK virus
QADLKISCKASPLL

SEQ ID NO: 42563 - protein, 14 aa, BK virus
ADLKISCKASPLLC

SEQ ID NO: 42564 - protein, 14 aa, BK virus
DLKISCKASPLLCS

SEQ ID NO: 42565 - protein, 14 aa, BK virus
LKISCKASPLLCSR

SEQ ID NO: 42566 - protein, 14 aa, BK virus
KISCKASPLLCSRA

SEQ ID NO: 42567 - protein, 14 aa, BK virus
ISCKASPLLCSRAV

SEQ ID NO: 42568 - protein, 14 aa, BK virus
SCKASPLLCSRAVS

SEQ ID NO: 42569 - protein, 14 aa, BK virus
CKASPLLCSRAVSK

SEQ ID NO: 42570 - protein, 14 aa, BK virus
KASPLLCSRAVSKQ

SEQ ID NO: 42571 - protein, 14 aa, BK virus
ASPLLCSRAVSKQA

SEQ ID NO: 42572 - protein, 14 aa, BK virus
SPLLCSRAVSKQAT

SEQ ID NO: 42573 - protein, 14 aa, BK virus
PLLCSRAVSKQATN

SEQ ID NO: 42574 - protein, 14 aa, BK virus
LLCSRAVSKQATNI

SEQ ID NO: 42575 - protein, 14 aa, BK virus
LCSRAVSKQATNIS

SEQ ID NO: 42576 - protein, 14 aa, BK virus
CSRAVSKQATNISS

SEQ ID NO: 42577 - protein, 14 aa, BK virus
NIQAISFTKRPHTL

SEQ ID NO: 42578 - protein, 14 aa, BK virus
IQAISFTKRPHTLF

SEQ ID NO: 42579 - protein, 14 aa, BK virus
QAISFTKRPHTLFI

SEQ ID NO: 42580 - protein, 14 aa, BK virus
QHCGSCVGHMKYWG

SEQ ID NO: 42581 - protein, 14 aa, BK virus
HCGSCVGHMKYWGN

SEQ ID NO: 42582 - protein, 14 aa, BK virus
CGSCVGHMKYWGNI

SEQ ID NO: 42583 - protein, 14 aa, BK virus
GSCVGHMKYWGNIF

SEQ ID NO: 42584 - protein, 14 aa, BK virus
SCVGHMKYWGNIFP

SEQ ID NO: 42585 - protein, 14 aa, BK virus
CVGHMKYWGNIFPS

SEQ ID NO: 42586 - protein, 14 aa, BK virus
VGHMKYWGNIFPSC

SEQ ID NO: 42587 - protein, 14 aa, BK virus
GHMKYWGNIFPSCE

SEQ ID NO: 42588 - protein, 14 aa, BK virus
HMKYWGNIFPSCES

SEQ ID NO: 42589 - protein, 14 aa, BK virus
MKYWGNIFPSCESP

SEQ ID NO: 42590 - protein, 14 aa, BK virus
KYWGNIFPSCESPK

SEQ ID NO: 42591 - protein, 14 aa, BK virus
YWGNIFPSCESPKI

SEQ ID NO: 42592 - protein, 14 aa, BK virus
WGNIFPSCESPKIP

SEQ ID NO: 42593 - protein, 14 aa, BK virus
GNIFPSCESPKIPS

SEQ ID NO: 42594 - protein, 14 aa, BK virus
NIFPSCESPKIPSI

SEQ ID NO: 42595 - protein, 14 aa, BK virus
IFPSCESPKIPSIF

SEQ ID NO: 42596 - protein, 14 aa, BK virus
FPSCESPKIPSIFI

SEQ ID NO: 42597 - protein, 14 aa, BK virus
PSCESPKIPSIFIS

SEQ ID NO: 42598 - protein, 14 aa, BK virus
SCESPKIPSIFIST

SEQ ID NO: 42599 - protein, 14 aa, BK virus
CESPKIPSIFISTG

SEQ ID NO: 42600 - protein, 14 aa, BK virus
ESPKIPSIFISTGI

SEQ ID NO: 42601 - protein, 14 aa, BK virus
SPKIPSIFISTGIR

SEQ ID NO: 42602 - protein, 14 aa, BK virus
PKIPSIFISTGIRY

SEQ ID NO: 42603 - protein, 14 aa, BK virus
KIPSIFISTGIRYP

SEQ ID NO: 42604 - protein, 14 aa, BK virus
IPSIFISTGIRYPA

SEQ ID NO: 42605 - protein, 14 aa, BK virus
PSIFISTGIRYPAL

SEQ ID NO: 42606 - protein, 14 aa, BK virus
SIFISTGIRYPALN

SEQ ID NO: 42607 - protein, 14 aa, BK virus
IFISTGIRYPALNW

SEQ ID NO: 42608 - protein, 14 aa, BK virus
FISTGIRYPALNWI

SEQ ID NO: 42609 - protein, 14 aa, BK virus
ISTGIRYPALNWIS

SEQ ID NO: 42610 - protein, 14 aa, BK virus
STGIRYPALNWISI

SEQ ID NO: 42611 - protein, 14 aa, BK virus
TGIRYPALNWISIV

SEQ ID NO: 42612 - protein, 14 aa, BK virus
GIRYPALNWISIVF

SEQ ID NO: 42613 - protein, 14 aa, BK virus
IRYPALNWISIVFV

SEQ ID NO: 42614 - protein, 14 aa, BK virus
RYPALNWISIVFVQ

SEQ ID NO: 42615 - protein, 14 aa, BK virus
YPALNWISIVFVQI

SEQ ID NO: 42616 - protein, 14 aa, BK virus
PALNWISIVFVQIG

SEQ ID NO: 42617 - protein, 14 aa, BK virus
ALNWISIVFVQIGL

SEQ ID NO: 42618 - protein, 14 aa, BK virus
LNWISIVFVQIGLM

SEQ ID NO: 42619 - protein, 14 aa, BK virus
NWISIVFVQIGLMV

SEQ ID NO: 42620 - protein, 14 aa, BK virus
WISIVFVQIGLMVS

SEQ ID NO: 42621 - protein, 14 aa, BK virus
ISIVFVQIGLMVSI

SEQ ID NO: 42622 - protein, 14 aa, BK virus
SIVFVQIGLMVSIH

SEQ ID NO: 42623 - protein, 14 aa, BK virus
IVFVQIGLMVSIHY

SEQ ID NO: 42624 - protein, 14 aa, BK virus
VFVQIGLMVSIHYL

SEQ ID NO: 42625 - protein, 14 aa, BK virus
FVQIGLMVSIHYLG

SEQ ID NO: 42626 - protein, 14 aa, BK virus
VQIGLMVSIHYLGL

SEQ ID NO: 42627 - protein, 14 aa, BK virus
QIGLMVSIHYLGLG

SEQ ID NO: 42628 - protein, 14 aa, BK virus
IGLMVSIHYLGLGC

SEQ ID NO: 42629 - protein, 14 aa, BK virus
GLMVSIHYLGLGCW

SEQ ID NO: 42630 - protein, 14 aa, BK virus
LMVSIHYLGLGCWV

SEQ ID NO: 42631 - protein, 14 aa, BK virus
MVSIHYLGLGCWVF

SEQ ID NO: 42632 - protein, 14 aa, BK virus
VSIHYLGLGCWVFR

SEQ ID NO: 42633 - protein, 14 aa, BK virus
SIHYLGLGCWVFRG

SEQ ID NO: 42634 - protein, 14 aa, BK virus
IHYLGLGCWVFRGY

SEQ ID NO: 42635 - protein, 14 aa, BK virus
HYLGLGCWVFRGYS

SEQ ID NO: 42636 - protein, 14 aa, BK virus
YLGLGCWVFRGYST

SEQ ID NO: 42637 - protein, 14 aa, BK virus
LGLGCWVFRGYSTI

SEQ ID NO: 42638 - protein, 14 aa, BK virus
GLGCWVFRGYSTIR

SEQ ID NO: 42639 - protein, 14 aa, BK virus
LGCWVFRGYSTIRV

SEQ ID NO: 42640 - protein, 14 aa, BK virus
GCWVFRGYSTIRVL

SEQ ID NO: 42641 - protein, 14 aa, BK virus
HSLHFQGFSTYSKE

SEQ ID NO: 42642 - protein, 14 aa, BK virus
SLHFQGFSTYSKEV

SEQ ID NO: 42643 - protein, 14 aa, BK virus
LHFQGFSTYSKEVE

SEQ ID NO: 42644 - protein, 14 aa, BK virus
HFQGFSTYSKEVEI

SEQ ID NO: 42645 - protein, 14 aa, BK virus
FQGFSTYSKEVEIT

SEQ ID NO: 42646 - protein, 14 aa, BK virus
QGFSTYSKEVEITA

SEQ ID NO: 42647 - protein, 14 aa, BK virus
GFSTYSKEVEITAL

SEQ ID NO: 42648 - protein, 14 aa, BK virus
FSTYSKEVEITALN

SEQ ID NO: 42649 - protein, 14 aa, BK virus
STYSKEVEITALNR

SEQ ID NO: 42650 - protein, 14 aa, BK virus
TYSKEVEITALNRF

SEQ ID NO: 42651 - protein, 14 aa, BK virus
YSKEVEITALNRFS

SEQ ID NO: 42652 - protein, 14 aa, BK virus
SKEVEITALNRFSS

SEQ ID NO: 42653 - protein, 14 aa, BK virus
KEVEITALNRFSST

SEQ ID NO: 42654 - protein, 14 aa, BK virus
EVEITALNRFSSTM

SEQ ID NO: 42655 - protein, 14 aa, BK virus
VEITALNRFSSTML

SEQ ID NO: 42656 - protein, 14 aa, BK virus
EITALNRFSSTMLM

SEQ ID NO: 42657 - protein, 14 aa, BK virus
ITALNRFSSTMLMH

SEQ ID NO: 42658 - protein, 14 aa, BK virus
TALNRFSSTMLMHF

SEQ ID NO: 42659 - protein, 14 aa, BK virus
ALNRFSSTMLMHFL

SEQ ID NO: 42660 - protein, 14 aa, BK virus
PCMKVKHASYSNNL

SEQ ID NO: 42661 - protein, 14 aa, BK virus
CMKVKHASYSNNLC

SEQ ID NO: 42662 - protein, 14 aa, BK virus
MKVKHASYSNNLCL

SEQ ID NO: 42663 - protein, 14 aa, BK virus
KVKHASYSNNLCLY

SEQ ID NO: 42664 - protein, 14 aa, BK virus
VKHASYSNNLCLYS

SEQ ID NO: 42665 - protein, 14 aa, BK virus
KHASYSNNLCLYSY

SEQ ID NO: 42666 - protein, 14 aa, BK virus
HASYSNNLCLYSYS

SEQ ID NO: 42667 - protein, 14 aa, BK virus
ASYSNNLCLYSYSL

SEQ ID NO: 42668 - protein, 14 aa, BK virus
SYSNNLCLYSYSLP

SEQ ID NO: 42669 - protein, 14 aa, BK virus
YSNNLCLYSYSLPH

SEQ ID NO: 42670 - protein, 14 aa, BK virus
SNNLCLYSYSLPHQ

SEQ ID NO: 42671 - protein, 14 aa, BK virus
IGEGNSCCAVTGKH

SEQ ID NO: 42672 - protein, 14 aa, BK virus
GEGNSCCAVTGKHF

SEQ ID NO: 42673 - protein, 14 aa, BK virus
EGNSCCAVTGKHFS

SEQ ID NO: 42674 - protein, 14 aa, BK virus
GNSCCAVTGKHFSL

SEQ ID NO: 42675 - protein, 14 aa, BK virus
NSCCAVTGKHFSLW

SEQ ID NO: 42676 - protein, 14 aa, BK virus
SCCAVTGKHFSLWA

SEQ ID NO: 42677 - protein, 14 aa, BK virus
CCAVTGKHFSLWAI

SEQ ID NO: 42678 - protein, 14 aa, BK virus
CAVTGKHFSLWAIT

SEQ ID NO: 42679 - protein, 14 aa, BK virus
AVTGKHFSLWAITA

SEQ ID NO: 42680 - protein, 14 aa, BK virus
VTGKHFSLWAITAK

SEQ ID NO: 42681 - protein, 14 aa, BK virus
TGKHFSLWAITAKV

SEQ ID NO: 42682 - protein, 14 aa, BK virus
GKHFSLWAITAKVI

SEQ ID NO: 42683 - protein, 14 aa, BK virus
KHFSLWAITAKVIF

SEQ ID NO: 42684 - protein, 14 aa, BK virus
HFSLWAITAKVIFS

SEQ ID NO: 42685 - protein, 14 aa, BK virus
FSLWAITAKVIFST

SEQ ID NO: 42686 - protein, 14 aa, BK virus
TKAPKVFIWIPHFW

SEQ ID NO: 42687 - protein, 14 aa, BK virus
KAPKVFIWIPHFWV

SEQ ID NO: 42688 - protein, 14 aa, BK virus
EAFYLCNSIYPSFN

SEQ ID NO: 42689 - protein, 14 aa, BK virus
AFYLCNSIYPSFNF

SEQ ID NO: 42690 - protein, 14 aa, BK virus
FWHLHGFLWLFGSC

SEQ ID NO: 42691 - protein, 14 aa, BK virus
WHLHGFLWLFGSCP

SEQ ID NO: 42692 - protein, 14 aa, BK virus
HLHGFLWLFGSCPW

SEQ ID NO: 42693 - protein, 14 aa, BK virus
LHGFLWLFGSCPWT

SEQ ID NO: 42694 - protein, 14 aa, BK virus
HGFLWLFGSCPWTL

SEQ ID NO: 42695 - protein, 14 aa, BK virus
GFLWLFGSCPWTLS

SEQ ID NO: 42696 - protein, 14 aa, BK virus
FLWLFGSCPWTLSF

SEQ ID NO: 42697 - protein, 14 aa, BK virus
LWLFGSCPWTLSFS

SEQ ID NO: 42698 - protein, 14 aa, BK virus
WLFGSCPWTLSFSF

SEQ ID NO: 42699 - protein, 14 aa, BK virus
LFGSCPWTLSFSFG

SEQ ID NO: 42700 - protein, 14 aa, BK virus
FGSCPWTLSFSFGW

SEQ ID NO: 42701 - protein, 14 aa, BK virus
GSCPWTLSFSFGWG

SEQ ID NO: 42702 - protein, 14 aa, BK virus
SCPWTLSFSFGWGH

SEQ ID NO: 42703 - protein, 14 aa, BK virus
CPWTLSFSFGWGHL

SEQ ID NO: 42704 - protein, 14 aa, BK virus
PWTLSFSFGWGHLH

SEQ ID NO: 42705 - protein, 14 aa, BK virus
WTLSFSFGWGHLHM

SEQ ID NO: 42706 - protein, 14 aa, BK virus
TLSFSFGWGHLHML

SEQ ID NO: 42707 - protein, 14 aa, BK virus
LSFSFGWGHLHMLQ

SEQ ID NO: 42708 - protein, 14 aa, BK virus
SFSFGWGHLHMLQE

SEQ ID NO: 42709 - protein, 14 aa, BK virus
FSFGWGHLHMLQEQ

SEQ ID NO: 42710 - protein, 14 aa, BK virus
SFGWGHLHMLQEQV

SEQ ID NO: 42711 - protein, 14 aa, BK virus
FGWGHLHMLQEQVL

SEQ ID NO: 42712 - protein, 14 aa, BK virus
GWGHLHMLQEQVLQ

SEQ ID NO: 42713 - protein, 14 aa, BK virus
WGHLHMLQEQVLQS

SEQ ID NO: 42714 - protein, 14 aa, BK virus
GHLHMLQEQVLQSR

SEQ ID NO: 42715 - protein, 14 aa, BK virus
HLHMLQEQVLQSRT

SEQ ID NO: 42716 - protein, 14 aa, BK virus
LHMLQEQVLQSRTG

SEQ ID NO: 42717 - protein, 14 aa, BK virus
HMLQEQVLQSRTGL

SEQ ID NO: 42718 - protein, 14 aa, BK virus
MLQEQVLQSRTGLE

SEQ ID NO: 42719 - protein, 14 aa, BK virus
LQEQVLQSRTGLEV

SEQ ID NO: 42720 - protein, 14 aa, BK virus
QEQVLQSRTGLEVK

SEQ ID NO: 42721 - protein, 14 aa, BK virus
EQVLQSRTGLEVKA

SEQ ID NO: 42722 - protein, 14 aa, BK virus
QVLQSRTGLEVKAT

SEQ ID NO: 42723 - protein, 14 aa, BK virus
VLQSRTGLEVKATS

SEQ ID NO: 42724 - protein, 14 aa, BK virus
LQSRTGLEVKATSI

SEQ ID NO: 42725 - protein, 14 aa, BK virus
QSRTGLEVKATSIE

SEQ ID NO: 42726 - protein, 14 aa, BK virus
SRTGLEVKATSIEE

SEQ ID NO: 42727 - protein, 14 aa, BK virus
RTGLEVKATSIEEQ

SEQ ID NO: 42728 - protein, 14 aa, BK virus
TGLEVKATSIEEQF

SEQ ID NO: 42729 - protein, 14 aa, BK virus
GLEVKATSIEEQFF

SEQ ID NO: 42730 - protein, 14 aa, BK virus
LEVKATSIEEQFFD

SEQ ID NO: 42731 - protein, 14 aa, BK virus
TLLNVHFVDFLSPF

SEQ ID NO: 42732 - protein, 14 aa, BK virus
LLNVHFVDFLSPFF

SEQ ID NO: 42733 - protein, 14 aa, BK virus
LNVHFVDFLSPFFV

SEQ ID NO: 42734 - protein, 14 aa, BK virus
LLLYCQHHLYYKYG

SEQ ID NO: 42735 - protein, 14 aa, BK virus
LLYCQHHLYYKYGQ

SEQ ID NO: 42736 - protein, 14 aa, BK virus
LYCQHHLYYKYGQN

SEQ ID NO: 42737 - protein, 14 aa, BK virus
YCQHHLYYKYGQNV

SEQ ID NO: 42738 - protein, 14 aa, BK virus
CQHHLYYKYGQNVH

SEQ ID NO: 42739 - protein, 14 aa, BK virus
QHHLYYKYGQNVHG

SEQ ID NO: 42740 - protein, 14 aa, BK virus
HHLYYKYGQNVHGY

SEQ ID NO: 42741 - protein, 14 aa, BK virus
HLYYKYGQNVHGYL

SEQ ID NO: 42742 - protein, 14 aa, BK virus
LYYKYGQNVHGYLP

SEQ ID NO: 42743 - protein, 14 aa, BK virus
YYKYGQNVHGYLPF

SEQ ID NO: 42744 - protein, 14 aa, BK virus
YKYGQNVHGYLPFQ

SEQ ID NO: 42745 - protein, 14 aa, BK virus
KYGQNVHGYLPFQL

SEQ ID NO: 42746 - protein, 14 aa, BK virus
YGQNVHGYLPFQLL

SEQ ID NO: 42747 - protein, 14 aa, BK virus
GQNVHGYLPFQLLV

SEQ ID NO: 42748 - protein, 14 aa, BK virus
GKDQNNIVEYNYKS

SEQ ID NO: 42749 - protein, 14 aa, BK virus
KDQNNIVEYNYKSL

SEQ ID NO: 42750 - protein, 14 aa, BK virus
QKYLHQETEYHSTH

SEQ ID NO: 42751 - protein, 14 aa, BK virus
KYLHQETEYHSTHL

SEQ ID NO: 42752 - protein, 14 aa, BK virus
YLHQETEYHSTHLG

SEQ ID NO: 42753 - protein, 14 aa, BK virus
TIPKPCLIADRGLQ

SEQ ID NO: 42754 - protein, 14 aa, BK virus
IPKPCLIADRGLQW

SEQ ID NO: 42755 - protein, 14 aa, BK virus
PKPCLIADRGLQWK

SEQ ID NO: 42756 - protein, 14 aa, BK virus
KPCLIADRGLQWKL

SEQ ID NO: 42757 - protein, 14 aa, BK virus
PCLIADRGLQWKLC

SEQ ID NO: 42758 - protein, 14 aa, BK virus
CLIADRGLQWKLCD

SEQ ID NO: 42759 - protein, 14 aa, BK virus
LIADRGLQWKLCDP

SEQ ID NO: 42760 - protein, 14 aa, BK virus
IADRGLQWKLCDPN

SEQ ID NO: 42761 - protein, 14 aa, BK virus
ADRGLQWKLCDPNH

SEQ ID NO: 42762 - protein, 14 aa, BK virus
DRGLQWKLCDPNHQ

SEQ ID NO: 42763 - protein, 14 aa, BK virus
RGLQWKLCDPNHQR

SEQ ID NO: 42764 - protein, 14 aa, BK virus
GLQWKLCDPNHQRT

SEQ ID NO: 42765 - protein, 14 aa, BK virus
LQWKLCDPNHQRTY

SEQ ID NO: 42766 - protein, 14 aa, BK virus
QWKLCDPNHQRTYT

SEQ ID NO: 42767 - protein, 14 aa, BK virus
WKLCDPNHQRTYTL

SEQ ID NO: 42768 - protein, 14 aa, BK virus
KLCDPNHQRTYTLL

SEQ ID NO: 42769 - protein, 14 aa, BK virus
LCDPNHQRTYTLLE

SEQ ID NO: 42770 - protein, 14 aa, BK virus
CDPNHQRTYTLLEL

SEQ ID NO: 42771 - protein, 14 aa, BK virus
DPNHQRTYTLLELR

SEQ ID NO: 42772 - protein, 14 aa, BK virus
PNHQRTYTLLELRN

SEQ ID NO: 42773 - protein, 14 aa, BK virus
PQEHQQLQHMFEEL

SEQ ID NO: 42774 - protein, 14 aa, BK virus
QEHQQLQHMFEELG

SEQ ID NO: 42775 - protein, 14 aa, BK virus
EHQQLQHMFEELGL

SEQ ID NO: 42776 - protein, 14 aa, BK virus
QQQPPQQQFQPLKI

SEQ ID NO: 42777 - protein, 14 aa, BK virus
QQPPQQQFQPLKIL

SEQ ID NO: 42778 - protein, 14 aa, BK virus
QPPQQQFQPLKILW

SEQ ID NO: 42779 - protein, 14 aa, BK virus
PPQQQFQPLKILWQ

SEQ ID NO: 42780 - protein, 14 aa, BK virus
PQQQFQPLKILWQQ

SEQ ID NO: 42781 - protein, 14 aa, BK virus
QQQFQPLKILWQQQ

SEQ ID NO: 42782 - protein, 14 aa, BK virus
QQFQPLKILWQQQP

SEQ ID NO: 42783 - protein, 14 aa, BK virus
QFQPLKILWQQQPQ

SEQ ID NO: 42784 - protein, 14 aa, BK virus
FQPLKILWQQQPQI

SEQ ID NO: 42785 - protein, 14 aa, BK virus
QPLKILWQQQPQIH

SEQ ID NO: 42786 - protein, 14 aa, BK virus
PLKILWQQQPQIHW

SEQ ID NO: 42787 - protein, 14 aa, BK virus
LKILWQQQPQIHWQ

SEQ ID NO: 42788 - protein, 14 aa, BK virus
KILWQQQPQIHWQL

SEQ ID NO: 42789 - protein, 14 aa, BK virus
ILWQQQPQIHWQLG

SEQ ID NO: 42790 - protein, 14 aa, BK virus
LWQQQPQIHWQLGP

SEQ ID NO: 42791 - protein, 14 aa, BK virus
WQQQPQIHWQLGPP

SEQ ID NO: 42792 - protein, 14 aa, BK virus
QQQPQIHWQLGPPK

SEQ ID NO: 42793 - protein, 14 aa, BK virus
QQPQIHWQLGPPKV

SEQ ID NO: 42794 - protein, 14 aa, BK virus
QPQIHWQLGPPKVL

SEQ ID NO: 42795 - protein, 14 aa, BK virus
PQIHWQLGPPKVLE

SEQ ID NO: 42796 - protein, 14 aa, BK virus
QIHWQLGPPKVLEQ

SEQ ID NO: 42797 - protein, 14 aa, BK virus
IHWQLGPPKVLEQH

SEQ ID NO: 42798 - protein, 14 aa, BK virus
HWQLGPPKVLEQHP

SEQ ID NO: 42799 - protein, 14 aa, BK virus
TWKYKKKGITYLGV

SEQ ID NO: 42800 - protein, 14 aa, BK virus
WKYKKKGITYLGVF

SEQ ID NO: 42801 - protein, 14 aa, BK virus
KYKKKGITYLGVFY

SEQ ID NO: 42802 - protein, 14 aa, BK virus
YKKKGITYLGVFYR

SEQ ID NO: 42803 - protein, 14 aa, BK virus
KKKGITYLGVFYRV

SEQ ID NO: 42804 - protein, 14 aa, BK virus
KKGITYLGVFYRVF

SEQ ID NO: 42805 - protein, 14 aa, BK virus
KGITYLGVFYRVFY

SEQ ID NO: 42806 - protein, 14 aa, BK virus
GITYLGVFYRVFYS

SEQ ID NO: 42807 - protein, 14 aa, BK virus
ITYLGVFYRVFYSR

SEQ ID NO: 42808 - protein, 14 aa, BK virus
SSGTFVFPVYTVFT

SEQ ID NO: 42809 - protein, 14 aa, BK virus
SGTFVFPVYTVFTS

SEQ ID NO: 42810 - protein, 14 aa, BK virus
GTFVFPVYTVFTST

SEQ ID NO: 42811 - protein, 14 aa, BK virus
TFVFPVYTVFTSTK

SEQ ID NO: 42812 - protein, 14 aa, BK virus
FVFPVYTVFTSTKF

SEQ ID NO: 42813 - protein, 14 aa, BK virus
VFPVYTVFTSTKFQ

SEQ ID NO: 42814 - protein, 14 aa, BK virus
FPVYTVFTSTKFQQ

SEQ ID NO: 42815 - protein, 14 aa, BK virus
PVYTVFTSTKFQQK

SEQ ID NO: 42816 - protein, 14 aa, BK virus
VYTVFTSTKFQQKL

SEQ ID NO: 42817 - protein, 14 aa, BK virus
NKNKNPLSSFFCSS

SEQ ID NO: 42818 - protein, 14 aa, BK virus
KNKNPLSSFFCSSP

SEQ ID NO: 42819 - protein, 14 aa, BK virus
NKNPLSSFFCSSPG

SEQ ID NO: 42820 - protein, 14 aa, BK virus
KNPLSSFFCSSPGF

SEQ ID NO: 42821 - protein, 14 aa, BK virus
NPLSSFFCSSPGFT

SEQ ID NO: 42822 - protein, 14 aa, BK virus
PLSSFFCSSPGFTN

SEQ ID NO: 42823 - protein, 14 aa, BK virus
LSSFFCSSPGFTNF

SEQ ID NO: 42824 - protein, 14 aa, BK virus
SSFFCSSPGFTNFH

SEQ ID NO: 42825 - protein, 14 aa, BK virus
LGTRPRFLGSQNMS

SEQ ID NO: 42826 - protein, 14 aa, BK virus
GTRPRFLGSQNMSV

SEQ ID NO: 42827 - protein, 14 aa, BK virus
TRPRFLGSQNMSVM

SEQ ID NO: 42828 - protein, 14 aa, BK virus
RPRFLGSQNMSVMH

SEQ ID NO: 42829 - protein, 14 aa, BK virus
PRFLGSQNMSVMHF

SEQ ID NO: 42830 - protein, 14 aa, BK virus
RFLGSQNMSVMHFP

SEQ ID NO: 42831 - protein, 14 aa, BK virus
FLGSQNMSVMHFPS

SEQ ID NO: 42832 - protein, 14 aa, BK virus
AAPPCESCTFLPEV

SEQ ID NO: 42833 - protein, 14 aa, BK virus
APPCESCTFLPEVM

SEQ ID NO: 42834 - protein, 14 aa, BK virus
PPCESCTFLPEVMV

SEQ ID NO: 42835 - protein, 14 aa, BK virus
PCESCTFLPEVMVW

SEQ ID NO: 42836 - protein, 14 aa, BK virus
CESCTFLPEVMVWL

SEQ ID NO: 42837 - protein, 14 aa, BK virus
ESCTFLPEVMVWLH

SEQ ID NO: 42838 - protein, 14 aa, BK virus
SCTFLPEVMVWLHS

SEQ ID NO: 42839 - protein, 14 aa, BK virus
CTFLPEVMVWLHSP

SEQ ID NO: 42840 - protein, 14 aa, BK virus
TFLPEVMVWLHSPV

SEQ ID NO: 42841 - protein, 14 aa, BK virus
FLPEVMVWLHSPVS

SEQ ID NO: 42842 - protein, 14 aa, BK virus
LPEVMVWLHSPVSH

SEQ ID NO: 42843 - protein, 14 aa, BK virus
PEVMVWLHSPVSHA

SEQ ID NO: 42844 - protein, 14 aa, BK virus
EVMVWLHSPVSHAL

SEQ ID NO: 42845 - protein, 14 aa, BK virus
VMVWLHSPVSHALS

SEQ ID NO: 42846 - protein, 14 aa, BK virus
MVWLHSPVSHALSF

SEQ ID NO: 42847 - protein, 14 aa, BK virus
VWLHSPVSHALSFL

SEQ ID NO: 42848 - protein, 14 aa, BK virus
WLHSPVSHALSFLR

SEQ ID NO: 42849 - protein, 14 aa, BK virus
LHSPVSHALSFLRS

SEQ ID NO: 42850 - protein, 14 aa, BK virus
HSPVSHALSFLRSW

SEQ ID NO: 42851 - protein, 14 aa, BK virus
SPVSHALSFLRSWF

SEQ ID NO: 42852 - protein, 14 aa, BK virus
PVSHALSFLRSWFG

SEQ ID NO: 42853 - protein, 14 aa, BK virus
VSHALSFLRSWFGC

SEQ ID NO: 42854 - protein, 14 aa, BK virus
SHALSFLRSWFGCI

SEQ ID NO: 42855 - protein, 14 aa, BK virus
HALSFLRSWFGCIP

SEQ ID NO: 42856 - protein, 14 aa, BK virus
ALSFLRSWFGCIPW

SEQ ID NO: 42857 - protein, 14 aa, BK virus
LSFLRSWFGCIPWV

SEQ ID NO: 42858 - protein, 14 aa, BK virus
SFLRSWFGCIPWVS

SEQ ID NO: 42859 - protein, 14 aa, BK virus
FLRSWFGCIPWVSS

SEQ ID NO: 42860 - protein, 14 aa, BK virus
LRSWFGCIPWVSSS

SEQ ID NO: 42861 - protein, 14 aa, BK virus
RSWFGCIPWVSSSS

SEQ ID NO: 42862 - protein, 14 aa, BK virus
SWFGCIPWVSSSSL

SEQ ID NO: 42863 - protein, 14 aa, BK virus
WFGCIPWVSSSSLW

SEQ ID NO: 42864 - protein, 14 aa, BK virus
FGCIPWVSSSSLWP

SEQ ID NO: 42865 - protein, 14 aa, BK virus
GCIPWVSSSSLWPF

SEQ ID NO: 42866 - protein, 14 aa, BK virus
CIPWVSSSSLWPFF

SEQ ID NO: 42867 - protein, 14 aa, BK virus
IPWVSSSSLWPFFL

SEQ ID NO: 42868 - protein, 14 aa, BK virus
YIRGRGRLCLHPFS

SEQ ID NO: 42869 - protein, 14 aa, BK virus
IRGRGRLCLHPFSQ

SEQ ID NO: 42870 - protein, 14 aa, BK virus
RGRGRLCLHPFSQV

SEQ ID NO: 42871 - protein, 14 aa, BK virus
GRGRLCLHPFSQVV

SEQ ID NO: 42872 - protein, 14 aa, BK virus
RGRLCLHPFSQVVR

SEQ ID NO: 42873 - protein, 14 aa, BK virus
GRLCLHPFSQVVRV

SEQ ID NO: 42874 - protein, 14 aa, BK virus
RLCLHPFSQVVRVW

SEQ ID NO: 42875 - protein, 14 aa, BK virus
LCLHPFSQVVRVWR

SEQ ID NO: 42876 - protein, 14 aa, BK virus
CLHPFSQVVRVWRL

SEQ ID NO: 42877 - protein, 14 aa, BK virus
LHPFSQVVRVWRLF

SEQ ID NO: 42878 - protein, 14 aa, BK virus
HPFSQVVRVWRLFL

SEQ ID NO: 42879 - protein, 14 aa, BK virus
PFSQVVRVWRLFLR

SEQ ID NO: 42880 - protein, 14 aa, BK virus
FSQVVRVWRLFLRP

SEQ ID NO: 42881 - protein, 14 aa, BK virus
SQVVRVWRLFLRPS

SEQ ID NO: 42882 - protein, 14 aa, BK virus
QVVRVWRLFLRPSK

SEQ ID NO: 42883 - protein, 14 aa, BK virus
VVRVWRLFLRPSKT

SEQ ID NO: 42884 - protein, 14 aa, BK virus
VRVWRLFLRPSKTI

SEQ ID NO: 42885 - protein, 14 aa, BK virus
RVWRLFLRPSKTIW

SEQ ID NO: 42886 - protein, 14 aa, BK virus
VWRLFLRPSKTIWG

SEQ ID NO: 42887 - protein, 14 aa, BK virus
WRLFLRPSKTIWGN

SEQ ID NO: 42888 - protein, 14 aa, BK virus
RLFLRPSKTIWGNP

SEQ ID NO: 42889 - protein, 14 aa, BK virus
LFLRPSKTIWGNPY

SEQ ID NO: 42890 - protein, 14 aa, BK virus
FLRPSKTIWGNPYS

SEQ ID NO: 42891 - protein, 14 aa, BK virus
LRPSKTIWGNPYSF

SEQ ID NO: 42892 - protein, 14 aa, BK virus
RPSKTIWGNPYSFA

SEQ ID NO: 42893 - protein, 14 aa, BK virus
PSKTIWGNPYSFAI

SEQ ID NO: 42894 - protein, 14 aa, BK virus
SKTIWGNPYSFAIF

SEQ ID NO: 42895 - protein, 14 aa, BK virus
KTIWGNPYSFAIFA

SEQ ID NO: 42896 - protein, 14 aa, BK virus
TIWGNPYSFAIFAK

SEQ ID NO: 42897 - protein, 15 aa, BK virus
KSCLGKSSLNEKSLF

SEQ ID NO: 42898 - protein, 15 aa, BK virus
SCLGKSSLNEKSLFK

SEQ ID NO: 42899 - protein, 15 aa, BK virus
CLGKSSLNEKSLFKE

SEQ ID NO: 42900 - protein, 15 aa, BK virus
LGKSSLNEKSLFKEV

SEQ ID NO: 42901 - protein, 15 aa, BK virus
FSSLPRYPVLQGMAY

SEQ ID NO: 42902 - protein, 15 aa, BK virus
SSLPRYPVLQGMAYL

SEQ ID NO: 42903 - protein, 15 aa, BK virus
SLPRYPVLQGMAYLF

SEQ ID NO: 42904 - protein, 15 aa, BK virus
LPRYPVLQGMAYLFQ

SEQ ID NO: 42905 - protein, 15 aa, BK virus
PRYPVLQGMAYLFQK

SEQ ID NO: 42906 - protein, 15 aa, BK virus
RYPVLQGMAYLFQKA

SEQ ID NO: 42907 - protein, 15 aa, BK virus
YPVLQGMAYLFQKAF

SEQ ID NO: 42908 - protein, 15 aa, BK virus
PVLQGMAYLFQKAFC

SEQ ID NO: 42909 - protein, 15 aa, BK virus
VLQGMAYLFQKAFCA

SEQ ID NO: 42910 - protein, 15 aa, BK virus
LQGMAYLFQKAFCAL

SEQ ID NO: 42911 - protein, 15 aa, BK virus
QGMAYLFQKAFCALP

SEQ ID NO: 42912 - protein, 15 aa, BK virus
GMAYLFQKAFCALPL

SEQ ID NO: 42913 - protein, 15 aa, BK virus
MAYLFQKAFCALPLH

SEQ ID NO: 42914 - protein, 15 aa, BK virus
AYLFQKAFCALPLHA

SEQ ID NO: 42915 - protein, 15 aa, BK virus
YLFQKAFCALPLHAM

SEQ ID NO: 42916 - protein, 15 aa, BK virus
LFQKAFCALPLHAMS

SEQ ID NO: 42917 - protein, 15 aa, BK virus
FQKAFCALPLHAMSA

SEQ ID NO: 42918 - protein, 15 aa, BK virus
KIFKKRALGLDRLLL

SEQ ID NO: 42919 - protein, 15 aa, BK virus
IFKKRALGLDRLLLH

SEQ ID NO: 42920 - protein, 15 aa, BK virus
RNSAMVGPNNWRNSL

SEQ ID NO: 42921 - protein, 15 aa, BK virus
NSAMVGPNNWRNSLQ

SEQ ID NO: 42922 - protein, 15 aa, BK virus
SAMVGPNNWRNSLQR

SEQ ID NO: 42923 - protein, 15 aa, BK virus
AMVGPNNWRNSLQRS

SEQ ID NO: 42924 - protein, 15 aa, BK virus
MVGPNNWRNSLQRSK

SEQ ID NO: 42925 - protein, 15 aa, BK virus
VGPNNWRNSLQRSKA

SEQ ID NO: 42926 - protein, 15 aa, BK virus
GPNNWRNSLQRSKAL

SEQ ID NO: 42927 - protein, 15 aa, BK virus
PNNWRNSLQRSKALR

SEQ ID NO: 42928 - protein, 15 aa, BK virus
VPTYGTEEWESWWSS

SEQ ID NO: 42929 - protein, 15 aa, BK virus
PTYGTEEWESWWSSF

SEQ ID NO: 42930 - protein, 15 aa, BK virus
TYGTEEWESWWSSFN

SEQ ID NO: 42931 - protein, 15 aa, BK virus
YGTEEWESWWSSFNE

SEQ ID NO: 42932 - protein, 15 aa, BK virus
GTEEWESWWSSFNEK

SEQ ID NO: 42933 - protein, 15 aa, BK virus
TEEWESWWSSFNEKW

SEQ ID NO: 42934 - protein, 15 aa, BK virus
EEWESWWSSFNEKWD

SEQ ID NO: 42935 - protein, 15 aa, BK virus
EWESWWSSFNEKWDE

SEQ ID NO: 42936 - protein, 15 aa, BK virus
WESWWSSFNEKWDED

SEQ ID NO: 42937 - protein, 15 aa, BK virus
ESWWSSFNEKWDEDL

SEQ ID NO: 42938 - protein, 15 aa, BK virus
SWWSSFNEKWDEDLF

SEQ ID NO: 42939 - protein, 15 aa, BK virus
WWSSFNEKWDEDLFC

SEQ ID NO: 42940 - protein, 15 aa, BK virus
WSSFNEKWDEDLFCH

SEQ ID NO: 42941 - protein, 15 aa, BK virus
SSFNEKWDEDLFCHE

SEQ ID NO: 42942 - protein, 15 aa, BK virus
SFNEKWDEDLFCHED

SEQ ID NO: 42943 - protein, 15 aa, BK virus
FNEKWDEDLFCHEDM

SEQ ID NO: 42944 - protein, 15 aa, BK virus
NEKWDEDLFCHEDMF

SEQ ID NO: 42945 - protein, 15 aa, BK virus
EKWDEDLFCHEDMFA

SEQ ID NO: 42946 - protein, 15 aa, BK virus
KWDEDLFCHEDMFAS

SEQ ID NO: 42947 - protein, 15 aa, BK virus
WDEDLFCHEDMFASD

SEQ ID NO: 42948 - protein, 15 aa, BK virus
DEDLFCHEDMFASDE

SEQ ID NO: 42949 - protein, 15 aa, BK virus
EDLFCHEDMFASDEE

SEQ ID NO: 42950 - protein, 15 aa, BK virus
DLFCHEDMFASDEEA

SEQ ID NO: 42951 - protein, 15 aa, BK virus
LFCHEDMFASDEEAT

SEQ ID NO: 42952 - protein, 15 aa, BK virus
FCHEDMFASDEEATA

SEQ ID NO: 42953 - protein, 15 aa, BK virus
CHEDMFASDEEATAD

SEQ ID NO: 42954 - protein, 15 aa, BK virus
HEDMFASDEEATADS

SEQ ID NO: 42955 - protein, 15 aa, BK virus
EDMFASDEEATADSQ

SEQ ID NO: 42956 - protein, 15 aa, BK virus
DMFASDEEATADSQH

SEQ ID NO: 42957 - protein, 15 aa, BK virus
MFASDEEATADSQHS

SEQ ID NO: 42958 - protein, 15 aa, BK virus
FASDEEATADSQHST

SEQ ID NO: 42959 - protein, 15 aa, BK virus
ASDEEATADSQHSTP

SEQ ID NO: 42960 - protein, 15 aa, BK virus
SDEEATADSQHSTPP

SEQ ID NO: 42961 - protein, 15 aa, BK virus
DEEATADSQHSTPPK

SEQ ID NO: 42962 - protein, 15 aa, BK virus
EEATADSQHSTPPKK

SEQ ID NO: 42963 - protein, 15 aa, BK virus
EATADSQHSTPPKKK

SEQ ID NO: 42964 - protein, 15 aa, BK virus
ATADSQHSTPPKKKR

SEQ ID NO: 42965 - protein, 15 aa, BK virus
TADSQHSTPPKKKRK

SEQ ID NO: 42966 - protein, 15 aa, BK virus
ADSQHSTPPKKKRKV

SEQ ID NO: 42967 - protein, 15 aa, BK virus
DSQHSTPPKKKRKVE

SEQ ID NO: 42968 - protein, 15 aa, BK virus
SQHSTPPKKKRKVED

SEQ ID NO: 42969 - protein, 15 aa, BK virus
QHSTPPKKKRKVEDP

SEQ ID NO: 42970 - protein, 15 aa, BK virus
HSTPPKKKRKVEDPK

SEQ ID NO: 42971 - protein, 15 aa, BK virus
STPPKKKRKVEDPKD

SEQ ID NO: 42972 - protein, 15 aa, BK virus
TPPKKKRKVEDPKDF

SEQ ID NO: 42973 - protein, 15 aa, BK virus
PPKKKRKVEDPKDFP

SEQ ID NO: 42974 - protein, 15 aa, BK virus
PKKKRKVEDPKDFPS

SEQ ID NO: 42975 - protein, 15 aa, BK virus
KKKRKVEDPKDFPSD

SEQ ID NO: 42976 - protein, 15 aa, BK virus
KKRKVEDPKDFPSDL

SEQ ID NO: 42977 - protein, 15 aa, BK virus
KRKVEDPKDFPSDLH

SEQ ID NO: 42978 - protein, 15 aa, BK virus
RKVEDPKDFPSDLHQ

SEQ ID NO: 42979 - protein, 15 aa, BK virus
KVEDPKDFPSDLHQF

SEQ ID NO: 42980 - protein, 15 aa, BK virus
VEDPKDFPSDLHQFL

SEQ ID NO: 42981 - protein, 15 aa, BK virus
EDPKDFPSDLHQFLS

SEQ ID NO: 42982 - protein, 15 aa, BK virus
DPKDFPSDLHQFLSQ

SEQ ID NO: 42983 - protein, 15 aa, BK virus
PKDFPSDLHQFLSQA

SEQ ID NO: 42984 - protein, 15 aa, BK virus
KDFPSDLHQFLSQAV

SEQ ID NO: 42985 - protein, 15 aa, BK virus
DFPSDLHQFLSQAVF

SEQ ID NO: 42986 - protein, 15 aa, BK virus
FPSDLHQFLSQAVFS

SEQ ID NO: 42987 - protein, 15 aa, BK virus
PSDLHQFLSQAVFSN

SEQ ID NO: 42988 - protein, 15 aa, BK virus
SDLHQFLSQAVFSNR

SEQ ID NO: 42989 - protein, 15 aa, BK virus
DLHQFLSQAVFSNRT

SEQ ID NO: 42990 - protein, 15 aa, BK virus
LHQFLSQAVFSNRTL

SEQ ID NO: 42991 - protein, 15 aa, BK virus
HQFLSQAVFSNRTLA

SEQ ID NO: 42992 - protein, 15 aa, BK virus
QFLSQAVFSNRTLAC

SEQ ID NO: 42993 - protein, 15 aa, BK virus
FLSQAVFSNRTLACF

SEQ ID NO: 42994 - protein, 15 aa, BK virus
LSQAVFSNRTLACFA

SEQ ID NO: 42995 - protein, 15 aa, BK virus
SQAVFSNRTLACFAV

SEQ ID NO: 42996 - protein, 15 aa, BK virus
QAVFSNRTLACFAVY

SEQ ID NO: 42997 - protein, 15 aa, BK virus
AVFSNRTLACFAVYT

SEQ ID NO: 42998 - protein, 15 aa, BK virus
VFSNRTLACFAVYTT

SEQ ID NO: 42999 - protein, 15 aa, BK virus
FSNRTLACFAVYTTK

SEQ ID NO: 43000 - protein, 15 aa, BK virus
SNRTLACFAVYTTKE

SEQ ID NO: 43001 - protein, 15 aa, BK virus
NRTLACFAVYTTKEK

SEQ ID NO: 43002 - protein, 15 aa, BK virus
RTLACFAVYTTKEKA

SEQ ID NO: 43003 - protein, 15 aa, BK virus
TLACFAVYTTKEKAQ

SEQ ID NO: 43004 - protein, 15 aa, BK virus
LACFAVYTTKEKAQI

SEQ ID NO: 43005 - protein, 15 aa, BK virus
ACFAVYTTKEKAQIL

SEQ ID NO: 43006 - protein, 15 aa, BK virus
CFAVYTTKEKAQILY

SEQ ID NO: 43007 - protein, 15 aa, BK virus
FAVYTTKEKAQILYK

SEQ ID NO: 43008 - protein, 15 aa, BK virus
AVYTTKEKAQILYKK

SEQ ID NO: 43009 - protein, 15 aa, BK virus
VYTTKEKAQILYKKL

SEQ ID NO: 43010 - protein, 15 aa, BK virus
YTTKEKAQILYKKLM

SEQ ID NO: 43011 - protein, 15 aa, BK virus
TTKEKAQILYKKLME

SEQ ID NO: 43012 - protein, 15 aa, BK virus
TKEKAQILYKKLMEK

SEQ ID NO: 43013 - protein, 15 aa, BK virus
KEKAQILYKKLMEKY

SEQ ID NO: 43014 - protein, 15 aa, BK virus
EKAQILYKKLMEKYS

SEQ ID NO: 43015 - protein, 15 aa, BK virus
KAQILYKKLMEKYSV

SEQ ID NO: 43016 - protein, 15 aa, BK virus
AQILYKKLMEKYSVT

SEQ ID NO: 43017 - protein, 15 aa, BK virus
QILYKKLMEKYSVTF

SEQ ID NO: 43018 - protein, 15 aa, BK virus
ILYKKLMEKYSVTFI

SEQ ID NO: 43019 - protein, 15 aa, BK virus
LYKKLMEKYSVTFIS

SEQ ID NO: 43020 - protein, 15 aa, BK virus
YKKLMEKYSVTFISR

SEQ ID NO: 43021 - protein, 15 aa, BK virus
KKLMEKYSVTFISRH

SEQ ID NO: 43022 - protein, 15 aa, BK virus
KLMEKYSVTFISRHM

SEQ ID NO: 43023 - protein, 15 aa, BK virus
LMEKYSVTFISRHMC

SEQ ID NO: 43024 - protein, 15 aa, BK virus
MEKYSVTFISRHMCA

SEQ ID NO: 43025 - protein, 15 aa, BK virus
EKYSVTFISRHMCAG

SEQ ID NO: 43026 - protein, 15 aa, BK virus
KYSVTFISRHMCAGH

SEQ ID NO: 43027 - protein, 15 aa, BK virus
YSVTFISRHMCAGHN

SEQ ID NO: 43028 - protein, 15 aa, BK virus
SVTFISRHMCAGHNI

SEQ ID NO: 43029 - protein, 15 aa, BK virus
VTFISRHMCAGHNII

SEQ ID NO: 43030 - protein, 15 aa, BK virus
TFISRHMCAGHNIIF

SEQ ID NO: 43031 - protein, 15 aa, BK virus
FISRHMCAGHNIIFF

SEQ ID NO: 43032 - protein, 15 aa, BK virus
ISRHMCAGHNIIFFL

SEQ ID NO: 43033 - protein, 15 aa, BK virus
SRHMCAGHNIIFFLT

SEQ ID NO: 43034 - protein, 15 aa, BK virus
RHMCAGHNIIFFLTP

SEQ ID NO: 43035 - protein, 15 aa, BK virus
HMCAGHNIIFFLTPH

SEQ ID NO: 43036 - protein, 15 aa, BK virus
MCAGHNIIFFLTPHR

SEQ ID NO: 43037 - protein, 15 aa, BK virus
CAGHNIIFFLTPHRH

SEQ ID NO: 43038 - protein, 15 aa, BK virus
AGHNIIFFLTPHRHR

SEQ ID NO: 43039 - protein, 15 aa, BK virus
GHNIIFFLTPHRHRV

SEQ ID NO: 43040 - protein, 15 aa, BK virus
HNIIFFLTPHRHRVS

SEQ ID NO: 43041 - protein, 15 aa, BK virus
NIIFFLTPHRHRVSA

SEQ ID NO: 43042 - protein, 15 aa, BK virus
IIFFLTPHRHRVSAI

SEQ ID NO: 43043 - protein, 15 aa, BK virus
IFFLTPHRHRVSAIN

SEQ ID NO: 43044 - protein, 15 aa, BK virus
FFLTPHRHRVSAINN

SEQ ID NO: 43045 - protein, 15 aa, BK virus
FLTPHRHRVSAINNF

SEQ ID NO: 43046 - protein, 15 aa, BK virus
LTPHRHRVSAINNFC

SEQ ID NO: 43047 - protein, 15 aa, BK virus
TPHRHRVSAINNFCQ

SEQ ID NO: 43048 - protein, 15 aa, BK virus
PHRHRVSAINNFCQK

SEQ ID NO: 43049 - protein, 15 aa, BK virus
HRHRVSAINNFCQKL

SEQ ID NO: 43050 - protein, 15 aa, BK virus
RHRVSAINNFCQKLC

SEQ ID NO: 43051 - protein, 15 aa, BK virus
HRVSAINNFCQKLCT

SEQ ID NO: 43052 - protein, 15 aa, BK virus
RVSAINNFCQKLCTF

SEQ ID NO: 43053 - protein, 15 aa, BK virus
VSAINNFCQKLCTFS

SEQ ID NO: 43054 - protein, 15 aa, BK virus
SAINNFCQKLCTFSF

SEQ ID NO: 43055 - protein, 15 aa, BK virus
AINNFCQKLCTFSFL

SEQ ID NO: 43056 - protein, 15 aa, BK virus
INNFCQKLCTFSFLI

SEQ ID NO: 43057 - protein, 15 aa, BK virus
NNFCQKLCTFSFLIC

SEQ ID NO: 43058 - protein, 15 aa, BK virus
NFCQKLCTFSFLICK

SEQ ID NO: 43059 - protein, 15 aa, BK virus
FCQKLCTFSFLICKG

SEQ ID NO: 43060 - protein, 15 aa, BK virus
CQKLCTFSFLICKGV

SEQ ID NO: 43061 - protein, 15 aa, BK virus
QKLCTFSFLICKGVN

SEQ ID NO: 43062 - protein, 15 aa, BK virus
KLCTFSFLICKGVNK

SEQ ID NO: 43063 - protein, 15 aa, BK virus
LCTFSFLICKGVNKE

SEQ ID NO: 43064 - protein, 15 aa, BK virus
CTFSFLICKGVNKEY

SEQ ID NO: 43065 - protein, 15 aa, BK virus
TFSFLICKGVNKEYL

SEQ ID NO: 43066 - protein, 15 aa, BK virus
FSFLICKGVNKEYLL

SEQ ID NO: 43067 - protein, 15 aa, BK virus
SFLICKGVNKEYLLY

SEQ ID NO: 43068 - protein, 15 aa, BK virus
FLICKGVNKEYLLYS

SEQ ID NO: 43069 - protein, 15 aa, BK virus
LICKGVNKEYLLYSA

SEQ ID NO: 43070 - protein, 15 aa, BK virus
ICKGVNKEYLLYSAL

SEQ ID NO: 43071 - protein, 15 aa, BK virus
CKGVNKEYLLYSALT

SEQ ID NO: 43072 - protein, 15 aa, BK virus
KGVNKEYLLYSALTR

SEQ ID NO: 43073 - protein, 15 aa, BK virus
GVNKEYLLYSALTRD

SEQ ID NO: 43074 - protein, 15 aa, BK virus
VNKEYLLYSALTRDP

SEQ ID NO: 43075 - protein, 15 aa, BK virus
NKEYLLYSALTRDPY

SEQ ID NO: 43076 - protein, 15 aa, BK virus
KEYLLYSALTRDPYH

SEQ ID NO: 43077 - protein, 15 aa, BK virus
EYLLYSALTRDPYHT

SEQ ID NO: 43078 - protein, 15 aa, BK virus
YLLYSALTRDPYHTI

SEQ ID NO: 43079 - protein, 15 aa, BK virus
LLYSALTRDPYHTIE

SEQ ID NO: 43080 - protein, 15 aa, BK virus
LYSALTRDPYHTIEE

SEQ ID NO: 43081 - protein, 15 aa, BK virus
YSALTRDPYHTIEES

SEQ ID NO: 43082 - protein, 15 aa, BK virus
SALTRDPYHTIEESI

SEQ ID NO: 43083 - protein, 15 aa, BK virus
ALTRDPYHTIEESIQ

SEQ ID NO: 43084 - protein, 15 aa, BK virus
LTRDPYHTIEESIQG

SEQ ID NO: 43085 - protein, 15 aa, BK virus
TRDPYHTIEESIQGG

SEQ ID NO: 43086 - protein, 15 aa, BK virus
RDPYHTIEESIQGGL

SEQ ID NO: 43087 - protein, 15 aa, BK virus
DPYHTIEESIQGGLK

SEQ ID NO: 43088 - protein, 15 aa, BK virus
PYHTIEESIQGGLKE

SEQ ID NO: 43089 - protein, 15 aa, BK virus
YHTIEESIQGGLKEH

SEQ ID NO: 43090 - protein, 15 aa, BK virus
HTIEESIQGGLKEHD

SEQ ID NO: 43091 - protein, 15 aa, BK virus
TIEESIQGGLKEHDF

SEQ ID NO: 43092 - protein, 15 aa, BK virus
IEESIQGGLKEHDFS

SEQ ID NO: 43093 - protein, 15 aa, BK virus
EESIQGGLKEHDFSP

SEQ ID NO: 43094 - protein, 15 aa, BK virus
ESIQGGLKEHDFSPE

SEQ ID NO: 43095 - protein, 15 aa, BK virus
SIQGGLKEHDFSPEE

SEQ ID NO: 43096 - protein, 15 aa, BK virus
IQGGLKEHDFSPEEP

SEQ ID NO: 43097 - protein, 15 aa, BK virus
QGGLKEHDFSPEEPE

SEQ ID NO: 43098 - protein, 15 aa, BK virus
GGLKEHDFSPEEPEE

SEQ ID NO: 43099 - protein, 15 aa, BK virus
GLKEHDFSPEEPEET

SEQ ID NO: 43100 - protein, 15 aa, BK virus
LKEHDFSPEEPEETK

SEQ ID NO: 43101 - protein, 15 aa, BK virus
KEHDFSPEEPEETKQ

SEQ ID NO: 43102 - protein, 15 aa, BK virus
EHDFSPEEPEETKQV

SEQ ID NO: 43103 - protein, 15 aa, BK virus
HDFSPEEPEETKQVS

SEQ ID NO: 43104 - protein, 15 aa, BK virus
DFSPEEPEETKQVSW

SEQ ID NO: 43105 - protein, 15 aa, BK virus
FSPEEPEETKQVSWK

SEQ ID NO: 43106 - protein, 15 aa, BK virus
SPEEPEETKQVSWKL

SEQ ID NO: 43107 - protein, 15 aa, BK virus
PEEPEETKQVSWKLI

SEQ ID NO: 43108 - protein, 15 aa, BK virus
EEPEETKQVSWKLIT

SEQ ID NO: 43109 - protein, 15 aa, BK virus
EPEETKQVSWKLITE

SEQ ID NO: 43110 - protein, 15 aa, BK virus
PEETKQVSWKLITEY

SEQ ID NO: 43111 - protein, 15 aa, BK virus
EETKQVSWKLITEYA

SEQ ID NO: 43112 - protein, 15 aa, BK virus
ETKQVSWKLITEYAV

SEQ ID NO: 43113 - protein, 15 aa, BK virus
TKQVSWKLITEYAVE

SEQ ID NO: 43114 - protein, 15 aa, BK virus
KQVSWKLITEYAVET

SEQ ID NO: 43115 - protein, 15 aa, BK virus
QVSWKLITEYAVETK

SEQ ID NO: 43116 - protein, 15 aa, BK virus
VSWKLITEYAVETKC

SEQ ID NO: 43117 - protein, 15 aa, BK virus
SWKLITEYAVETKCE

SEQ ID NO: 43118 - protein, 15 aa, BK virus
WKLITEYAVETKCED

SEQ ID NO: 43119 - protein, 15 aa, BK virus
KLITEYAVETKCEDV

SEQ ID NO: 43120 - protein, 15 aa, BK virus
LITEYAVETKCEDVF

SEQ ID NO: 43121 - protein, 15 aa, BK virus
ITEYAVETKCEDVFL

SEQ ID NO: 43122 - protein, 15 aa, BK virus
TEYAVETKCEDVFLL

SEQ ID NO: 43123 - protein, 15 aa, BK virus
EYAVETKCEDVFLLL

SEQ ID NO: 43124 - protein, 15 aa, BK virus
YAVETKCEDVFLLLG

SEQ ID NO: 43125 - protein, 15 aa, BK virus
AVETKCEDVFLLLGM

SEQ ID NO: 43126 - protein, 15 aa, BK virus
VETKCEDVFLLLGMY

SEQ ID NO: 43127 - protein, 15 aa, BK virus
ETKCEDVFLLLGMYL

SEQ ID NO: 43128 - protein, 15 aa, BK virus
TKCEDVFLLLGMYLE

SEQ ID NO: 43129 - protein, 15 aa, BK virus
KCEDVFLLLGMYLEF

SEQ ID NO: 43130 - protein, 15 aa, BK virus
CEDVFLLLGMYLEFQ

SEQ ID NO: 43131 - protein, 15 aa, BK virus
EDVFLLLGMYLEFQY

SEQ ID NO: 43132 - protein, 15 aa, BK virus
DVFLLLGMYLEFQYN

SEQ ID NO: 43133 - protein, 15 aa, BK virus
VFLLLGMYLEFQYNV

SEQ ID NO: 43134 - protein, 15 aa, BK virus
FLLLGMYLEFQYNVE

SEQ ID NO: 43135 - protein, 15 aa, BK virus
LLLGMYLEFQYNVEE

SEQ ID NO: 43136 - protein, 15 aa, BK virus
LLGMYLEFQYNVEEC

SEQ ID NO: 43137 - protein, 15 aa, BK virus
LGMYLEFQYNVEECK

SEQ ID NO: 43138 - protein, 15 aa, BK virus
GMYLEFQYNVEECKK

SEQ ID NO: 43139 - protein, 15 aa, BK virus
MYLEFQYNVEECKKC

SEQ ID NO: 43140 - protein, 15 aa, BK virus
YLEFQYNVEECKKCQ

SEQ ID NO: 43141 - protein, 15 aa, BK virus
LEFQYNVEECKKCQK

SEQ ID NO: 43142 - protein, 15 aa, BK virus
EFQYNVEECKKCQKK

SEQ ID NO: 43143 - protein, 15 aa, BK virus
FQYNVEECKKCQKKD

SEQ ID NO: 43144 - protein, 15 aa, BK virus
QYNVEECKKCQKKDQ

SEQ ID NO: 43145 - protein, 15 aa, BK virus
YNVEECKKCQKKDQP

SEQ ID NO: 43146 - protein, 15 aa, BK virus
NVEECKKCQKKDQPY

SEQ ID NO: 43147 - protein, 15 aa, BK virus
VEECKKCQKKDQPYH

SEQ ID NO: 43148 - protein, 15 aa, BK virus
EECKKCQKKDQPYHF

SEQ ID NO: 43149 - protein, 15 aa, BK virus
ECKKCQKKDQPYHFK

SEQ ID NO: 43150 - protein, 15 aa, BK virus
CKKCQKKDQPYHFKY

SEQ ID NO: 43151 - protein, 15 aa, BK virus
KKCQKKDQPYHFKYH

SEQ ID NO: 43152 - protein, 15 aa, BK virus
KCQKKDQPYHFKYHE

SEQ ID NO: 43153 - protein, 15 aa, BK virus
CQKKDQPYHFKYHEK

SEQ ID NO: 43154 - protein, 15 aa, BK virus
QKKDQPYHFKYHEKH

SEQ ID NO: 43155 - protein, 15 aa, BK virus
KKDQPYHFKYHEKHF

SEQ ID NO: 43156 - protein, 15 aa, BK virus
KDQPYHFKYHEKHFA

SEQ ID NO: 43157 - protein, 15 aa, BK virus
DQPYHFKYHEKHFAN

SEQ ID NO: 43158 - protein, 15 aa, BK virus
QPYHFKYHEKHFANA

SEQ ID NO: 43159 - protein, 15 aa, BK virus
PYHFKYHEKHFANAI

SEQ ID NO: 43160 - protein, 15 aa, BK virus
YHFKYHEKHFANAII

SEQ ID NO: 43161 - protein, 15 aa, BK virus
HFKYHEKHFANAIIF

SEQ ID NO: 43162 - protein, 15 aa, BK virus
FKYHEKHFANAIIFA

SEQ ID NO: 43163 - protein, 15 aa, BK virus
KYHEKHFANAIIFAE

SEQ ID NO: 43164 - protein, 15 aa, BK virus
YHEKHFANAIIFAES

SEQ ID NO: 43165 - protein, 15 aa, BK virus
HEKHFANAIIFAESK

SEQ ID NO: 43166 - protein, 15 aa, BK virus
EKHFANAIIFAESKN

SEQ ID NO: 43167 - protein, 15 aa, BK virus
KHFANAIIFAESKNQ

SEQ ID NO: 43168 - protein, 15 aa, BK virus
HFANAIIFAESKNQK

SEQ ID NO: 43169 - protein, 15 aa, BK virus
FANAIIFAESKNQKS

SEQ ID NO: 43170 - protein, 15 aa, BK virus
ANAIIFAESKNQKSI

SEQ ID NO: 43171 - protein, 15 aa, BK virus
NAIIFAESKNQKSIC

SEQ ID NO: 43172 - protein, 15 aa, BK virus
AIIFAESKNQKSICQ

SEQ ID NO: 43173 - protein, 15 aa, BK virus
IIFAESKNQKSICQQ

SEQ ID NO: 43174 - protein, 15 aa, BK virus
IFAESKNQKSICQQA

SEQ ID NO: 43175 - protein, 15 aa, BK virus
FAESKNQKSICQQAV

SEQ ID NO: 43176 - protein, 15 aa, BK virus
AESKNQKSICQQAVD

SEQ ID NO: 43177 - protein, 15 aa, BK virus
ESKNQKSICQQAVDT

SEQ ID NO: 43178 - protein, 15 aa, BK virus
SKNQKSICQQAVDTV

SEQ ID NO: 43179 - protein, 15 aa, BK virus
KNQKSICQQAVDTVL

SEQ ID NO: 43180 - protein, 15 aa, BK virus
NQKSICQQAVDTVLA

SEQ ID NO: 43181 - protein, 15 aa, BK virus
QKSICQQAVDTVLAK

SEQ ID NO: 43182 - protein, 15 aa, BK virus
KSICQQAVDTVLAKK

SEQ ID NO: 43183 - protein, 15 aa, BK virus
SICQQAVDTVLAKKR

SEQ ID NO: 43184 - protein, 15 aa, BK virus
ICQQAVDTVLAKKRV

SEQ ID NO: 43185 - protein, 15 aa, BK virus
CQQAVDTVLAKKRVD

SEQ ID NO: 43186 - protein, 15 aa, BK virus
QQAVDTVLAKKRVDT

SEQ ID NO: 43187 - protein, 15 aa, BK virus
QAVDTVLAKKRVDTL

SEQ ID NO: 43188 - protein, 15 aa, BK virus
AVDTVLAKKRVDTLH

SEQ ID NO: 43189 - protein, 15 aa, BK virus
VDTVLAKKRVDTLHM

SEQ ID NO: 43190 - protein, 15 aa, BK virus
DTVLAKKRVDTLHMT

SEQ ID NO: 43191 - protein, 15 aa, BK virus
TVLAKKRVDTLHMTR

SEQ ID NO: 43192 - protein, 15 aa, BK virus
VLAKKRVDTLHMTRE

SEQ ID NO: 43193 - protein, 15 aa, BK virus
LAKKRVDTLHMTREE

SEQ ID NO: 43194 - protein, 15 aa, BK virus
AKKRVDTLHMTREEM

SEQ ID NO: 43195 - protein, 15 aa, BK virus
KKRVDTLHMTREEML

SEQ ID NO: 43196 - protein, 15 aa, BK virus
KRVDTLHMTREEMLT

SEQ ID NO: 43197 - protein, 15 aa, BK virus
RVDTLHMTREEMLTE

SEQ ID NO: 43198 - protein, 15 aa, BK virus
VDTLHMTREEMLTER

SEQ ID NO: 43199 - protein, 15 aa, BK virus
DTLHMTREEMLTERF

SEQ ID NO: 43200 - protein, 15 aa, BK virus
TLHMTREEMLTERFN

SEQ ID NO: 43201 - protein, 15 aa, BK virus
LHMTREEMLTERFNH

SEQ ID NO: 43202 - protein, 15 aa, BK virus
HMTREEMLTERFNHI

SEQ ID NO: 43203 - protein, 15 aa, BK virus
MTREEMLTERFNHIL

SEQ ID NO: 43204 - protein, 15 aa, BK virus
TREEMLTERFNHILD

SEQ ID NO: 43205 - protein, 15 aa, BK virus
REEMLTERFNHILDK

SEQ ID NO: 43206 - protein, 15 aa, BK virus
EEMLTERFNHILDKM

SEQ ID NO: 43207 - protein, 15 aa, BK virus
EMLTERFNHILDKMD

SEQ ID NO: 43208 - protein, 15 aa, BK virus
MLTERFNHILDKMDL

SEQ ID NO: 43209 - protein, 15 aa, BK virus
LTERFNHILDKMDLI

SEQ ID NO: 43210 - protein, 15 aa, BK virus
TERFNHILDKMDLIF

SEQ ID NO: 43211 - protein, 15 aa, BK virus
ERFNHILDKMDLIFG

SEQ ID NO: 43212 - protein, 15 aa, BK virus
RFNHILDKMDLIFGA

SEQ ID NO: 43213 - protein, 15 aa, BK virus
FNHILDKMDLIFGAH

SEQ ID NO: 43214 - protein, 15 aa, BK virus
NHILDKMDLIFGAHG

SEQ ID NO: 43215 - protein, 15 aa, BK virus
HILDKMDLIFGAHGN

SEQ ID NO: 43216 - protein, 15 aa, BK virus
ILDKMDLIFGAHGNA

SEQ ID NO: 43217 - protein, 15 aa, BK virus
LDKMDLIFGAHGNAV

SEQ ID NO: 43218 - protein, 15 aa, BK virus
DKMDLIFGAHGNAVL

SEQ ID NO: 43219 - protein, 15 aa, BK virus
KMDLIFGAHGNAVLE

SEQ ID NO: 43220 - protein, 15 aa, BK virus
MDLIFGAHGNAVLEQ

SEQ ID NO: 43221 - protein, 15 aa, BK virus
DLIFGAHGNAVLEQY

SEQ ID NO: 43222 - protein, 15 aa, BK virus
LIFGAHGNAVLEQYM

SEQ ID NO: 43223 - protein, 15 aa, BK virus
IFGAHGNAVLEQYMA

SEQ ID NO: 43224 - protein, 15 aa, BK virus
FGAHGNAVLEQYMAG

SEQ ID NO: 43225 - protein, 15 aa, BK virus
GAHGNAVLEQYMAGV

SEQ ID NO: 43226 - protein, 15 aa, BK virus
AHGNAVLEQYMAGVA

SEQ ID NO: 43227 - protein, 15 aa, BK virus
HGNAVLEQYMAGVAW

SEQ ID NO: 43228 - protein, 15 aa, BK virus
GNAVLEQYMAGVAWL

SEQ ID NO: 43229 - protein, 15 aa, BK virus
NAVLEQYMAGVAWLH

SEQ ID NO: 43230 - protein, 15 aa, BK virus
AVLEQYMAGVAWLHC

SEQ ID NO: 43231 - protein, 15 aa, BK virus
VLEQYMAGVAWLHCL

SEQ ID NO: 43232 - protein, 15 aa, BK virus
LEQYMAGVAWLHCLL

SEQ ID NO: 43233 - protein, 15 aa, BK virus
EQYMAGVAWLHCLLP

SEQ ID NO: 43234 - protein, 15 aa, BK virus
QYMAGVAWLHCLLPK

SEQ ID NO: 43235 - protein, 15 aa, BK virus
YMAGVAWLHCLLPKM

SEQ ID NO: 43236 - protein, 15 aa, BK virus
MAGVAWLHCLLPKMD

SEQ ID NO: 43237 - protein, 15 aa, BK virus
AGVAWLHCLLPKMDS

SEQ ID NO: 43238 - protein, 15 aa, BK virus
GVAWLHCLLPKMDSV

SEQ ID NO: 43239 - protein, 15 aa, BK virus
VAWLHCLLPKMDSVI

SEQ ID NO: 43240 - protein, 15 aa, BK virus
AWLHCLLPKMDSVIF

SEQ ID NO: 43241 - protein, 15 aa, BK virus
WLHCLLPKMDSVIFD

SEQ ID NO: 43242 - protein, 15 aa, BK virus
LHCLLPKMDSVIFDF

SEQ ID NO: 43243 - protein, 15 aa, BK virus
HCLLPKMDSVIFDFL

SEQ ID NO: 43244 - protein, 15 aa, BK virus
CLLPKMDSVIFDFLH

SEQ ID NO: 43245 - protein, 15 aa, BK virus
LLPKMDSVIFDFLHC

SEQ ID NO: 43246 - protein, 15 aa, BK virus
LPKMDSVIFDFLHCI

SEQ ID NO: 43247 - protein, 15 aa, BK virus
PKMDSVIFDFLHCIV

SEQ ID NO: 43248 - protein, 15 aa, BK virus
KMDSVIFDFLHCIVF

SEQ ID NO: 43249 - protein, 15 aa, BK virus
MDSVIFDFLHCIVFN

SEQ ID NO: 43250 - protein, 15 aa, BK virus
DSVIFDFLHCIVFNV

SEQ ID NO: 43251 - protein, 15 aa, BK virus
SVIFDFLHCIVFNVP

SEQ ID NO: 43252 - protein, 15 aa, BK virus
VIFDFLHCIVFNVPK

SEQ ID NO: 43253 - protein, 15 aa, BK virus
IFDFLHCIVFNVPKR

SEQ ID NO: 43254 - protein, 15 aa, BK virus
FDFLHCIVFNVPKRR

SEQ ID NO: 43255 - protein, 15 aa, BK virus
DFLHCIVFNVPKRRY

SEQ ID NO: 43256 - protein, 15 aa, BK virus
FLHCIVFNVPKRRYW

SEQ ID NO: 43257 - protein, 15 aa, BK virus
LHCIVFNVPKRRYWL

SEQ ID NO: 43258 - protein, 15 aa, BK virus
HCIVFNVPKRRYWLF

SEQ ID NO: 43259 - protein, 15 aa, BK virus
CIVFNVPKRRYWLFK

SEQ ID NO: 43260 - protein, 15 aa, BK virus
IVFNVPKRRYWLFKG

SEQ ID NO: 43261 - protein, 15 aa, BK virus
VFNVPKRRYWLFKGP

SEQ ID NO: 43262 - protein, 15 aa, BK virus
FNVPKRRYWLFKGPI

SEQ ID NO: 43263 - protein, 15 aa, BK virus
NVPKRRYWLFKGPID

SEQ ID NO: 43264 - protein, 15 aa, BK virus
VPKRRYWLFKGPIDS

SEQ ID NO: 43265 - protein, 15 aa, BK virus
PKRRYWLFKGPIDSG

SEQ ID NO: 43266 - protein, 15 aa, BK virus
KRRYWLFKGPIDSGK

SEQ ID NO: 43267 - protein, 15 aa, BK virus
RRYWLFKGPIDSGKT

SEQ ID NO: 43268 - protein, 15 aa, BK virus
RYWLFKGPIDSGKTT

SEQ ID NO: 43269 - protein, 15 aa, BK virus
YWLFKGPIDSGKTTL

SEQ ID NO: 43270 - protein, 15 aa, BK virus
WLFKGPIDSGKTTLA

SEQ ID NO: 43271 - protein, 15 aa, BK virus
LFKGPIDSGKTTLAA

SEQ ID NO: 43272 - protein, 15 aa, BK virus
FKGPIDSGKTTLAAG

SEQ ID NO: 43273 - protein, 15 aa, BK virus
KGPIDSGKTTLAAGL

SEQ ID NO: 43274 - protein, 15 aa, BK virus
GPIDSGKTTLAAGLL

SEQ ID NO: 43275 - protein, 15 aa, BK virus
PIDSGKTTLAAGLLD

SEQ ID NO: 43276 - protein, 15 aa, BK virus
IDSGKTTLAAGLLDL

SEQ ID NO: 43277 - protein, 15 aa, BK virus
DSGKTTLAAGLLDLC

SEQ ID NO: 43278 - protein, 15 aa, BK virus
SGKTTLAAGLLDLCG

SEQ ID NO: 43279 - protein, 15 aa, BK virus
GKTTLAAGLLDLCGG

SEQ ID NO: 43280 - protein, 15 aa, BK virus
KTTLAAGLLDLCGGK

SEQ ID NO: 43281 - protein, 15 aa, BK virus
TTLAAGLLDLCGGKA

SEQ ID NO: 43282 - protein, 15 aa, BK virus
TLAAGLLDLCGGKAL

SEQ ID NO: 43283 - protein, 15 aa, BK virus
LAAGLLDLCGGKALN

SEQ ID NO: 43284 - protein, 15 aa, BK virus
AAGLLDLCGGKALNV

SEQ ID NO: 43285 - protein, 15 aa, BK virus
AGLLDLCGGKALNVN

SEQ ID NO: 43286 - protein, 15 aa, BK virus
GLLDLCGGKALNVNL

SEQ ID NO: 43287 - protein, 15 aa, BK virus
LLDLCGGKALNVNLP

SEQ ID NO: 43288 - protein, 15 aa, BK virus
LDLCGGKALNVNLPM

SEQ ID NO: 43289 - protein, 15 aa, BK virus
DLCGGKALNVNLPME

SEQ ID NO: 43290 - protein, 15 aa, BK virus
LCGGKALNVNLPMER

SEQ ID NO: 43291 - protein, 15 aa, BK virus
CGGKALNVNLPMERL

SEQ ID NO: 43292 - protein, 15 aa, BK virus
GGKALNVNLPMERLT

SEQ ID NO: 43293 - protein, 15 aa, BK virus
GKALNVNLPMERLTF

SEQ ID NO: 43294 - protein, 15 aa, BK virus
KALNVNLPMERLTFE

SEQ ID NO: 43295 - protein, 15 aa, BK virus
ALNVNLPMERLTFEL

SEQ ID NO: 43296 - protein, 15 aa, BK virus
LNVNLPMERLTFELG

SEQ ID NO: 43297 - protein, 15 aa, BK virus
NVNLPMERLTFELGV

SEQ ID NO: 43298 - protein, 15 aa, BK virus
VNLPMERLTFELGVA

SEQ ID NO: 43299 - protein, 15 aa, BK virus
NLPMERLTFELGVAI

SEQ ID NO: 43300 - protein, 15 aa, BK virus
LPMERLTFELGVAID

SEQ ID NO: 43301 - protein, 15 aa, BK virus
PMERLTFELGVAIDQ

SEQ ID NO: 43302 - protein, 15 aa, BK virus
MERLTFELGVAIDQY

SEQ ID NO: 43303 - protein, 15 aa, BK virus
ERLTFELGVAIDQYM

SEQ ID NO: 43304 - protein, 15 aa, BK virus
RLTFELGVAIDQYMV

SEQ ID NO: 43305 - protein, 15 aa, BK virus
LTFELGVAIDQYMVV

SEQ ID NO: 43306 - protein, 15 aa, BK virus
TFELGVAIDQYMVVF

SEQ ID NO: 43307 - protein, 15 aa, BK virus
FELGVAIDQYMVVFE

SEQ ID NO: 43308 - protein, 15 aa, BK virus
ELGVAIDQYMVVFED

SEQ ID NO: 43309 - protein, 15 aa, BK virus
LGVAIDQYMVVFEDV

SEQ ID NO: 43310 - protein, 15 aa, BK virus
GVAIDQYMVVFEDVK

SEQ ID NO: 43311 - protein, 15 aa, BK virus
VAIDQYMVVFEDVKG

SEQ ID NO: 43312 - protein, 15 aa, BK virus
AIDQYMVVFEDVKGT

SEQ ID NO: 43313 - protein, 15 aa, BK virus
IDQYMVVFEDVKGTG

SEQ ID NO: 43314 - protein, 15 aa, BK virus
DQYMVVFEDVKGTGA

SEQ ID NO: 43315 - protein, 15 aa, BK virus
QYMVVFEDVKGTGAE

SEQ ID NO: 43316 - protein, 15 aa, BK virus
YMVVFEDVKGTGAES

SEQ ID NO: 43317 - protein, 15 aa, BK virus
MVVFEDVKGTGAESK

SEQ ID NO: 43318 - protein, 15 aa, BK virus
VVFEDVKGTGAESKD

SEQ ID NO: 43319 - protein, 15 aa, BK virus
VFEDVKGTGAESKDL

SEQ ID NO: 43320 - protein, 15 aa, BK virus
FEDVKGTGAESKDLP

SEQ ID NO: 43321 - protein, 15 aa, BK virus
EDVKGTGAESKDLPS

SEQ ID NO: 43322 - protein, 15 aa, BK virus
DVKGTGAESKDLPSG

SEQ ID NO: 43323 - protein, 15 aa, BK virus
VKGTGAESKDLPSGH

SEQ ID NO: 43324 - protein, 15 aa, BK virus
KGTGAESKDLPSGHG

SEQ ID NO: 43325 - protein, 15 aa, BK virus
GTGAESKDLPSGHGI

SEQ ID NO: 43326 - protein, 15 aa, BK virus
TGAESKDLPSGHGIN

SEQ ID NO: 43327 - protein, 15 aa, BK virus
GAESKDLPSGHGINN

SEQ ID NO: 43328 - protein, 15 aa, BK virus
AESKDLPSGHGINNL

SEQ ID NO: 43329 - protein, 15 aa, BK virus
ESKDLPSGHGINNLD

SEQ ID NO: 43330 - protein, 15 aa, BK virus
SKDLPSGHGINNLDS

SEQ ID NO: 43331 - protein, 15 aa, BK virus
KDLPSGHGINNLDSL

SEQ ID NO: 43332 - protein, 15 aa, BK virus
DLPSGHGINNLDSLR

SEQ ID NO: 43333 - protein, 15 aa, BK virus
LPSGHGINNLDSLRD

SEQ ID NO: 43334 - protein, 15 aa, BK virus
PSGHGINNLDSLRDY

SEQ ID NO: 43335 - protein, 15 aa, BK virus
SGHGINNLDSLRDYL

SEQ ID NO: 43336 - protein, 15 aa, BK virus
GHGINNLDSLRDYLD

SEQ ID NO: 43337 - protein, 15 aa, BK virus
HGINNLDSLRDYLDG

SEQ ID NO: 43338 - protein, 15 aa, BK virus
GINNLDSLRDYLDGS

SEQ ID NO: 43339 - protein, 15 aa, BK virus
INNLDSLRDYLDGSV

SEQ ID NO: 43340 - protein, 15 aa, BK virus
NNLDSLRDYLDGSVK

SEQ ID NO: 43341 - protein, 15 aa, BK virus
NLDSLRDYLDGSVKV

SEQ ID NO: 43342 - protein, 15 aa, BK virus
LDSLRDYLDGSVKVN

SEQ ID NO: 43343 - protein, 15 aa, BK virus
DSLRDYLDGSVKVNL

SEQ ID NO: 43344 - protein, 15 aa, BK virus
SLRDYLDGSVKVNLE

SEQ ID NO: 43345 - protein, 15 aa, BK virus
LRDYLDGSVKVNLEK

SEQ ID NO: 43346 - protein, 15 aa, BK virus
RDYLDGSVKVNLEKK

SEQ ID NO: 43347 - protein, 15 aa, BK virus
DYLDGSVKVNLEKKH

SEQ ID NO: 43348 - protein, 15 aa, BK virus
YLDGSVKVNLEKKHL

SEQ ID NO: 43349 - protein, 15 aa, BK virus
LDGSVKVNLEKKHLN

SEQ ID NO: 43350 - protein, 15 aa, BK virus
DGSVKVNLEKKHLNK

SEQ ID NO: 43351 - protein, 15 aa, BK virus
GSVKVNLEKKHLNKR

SEQ ID NO: 43352 - protein, 15 aa, BK virus
SVKVNLEKKHLNKRT

SEQ ID NO: 43353 - protein, 15 aa, BK virus
VKVNLEKKHLNKRTQ

SEQ ID NO: 43354 - protein, 15 aa, BK virus
KVNLEKKHLNKRTQI

SEQ ID NO: 43355 - protein, 15 aa, BK virus
VNLEKKHLNKRTQIF

SEQ ID NO: 43356 - protein, 15 aa, BK virus
NLEKKHLNKRTQIFP

SEQ ID NO: 43357 - protein, 15 aa, BK virus
LEKKHLNKRTQIFPP

SEQ ID NO: 43358 - protein, 15 aa, BK virus
EKKHLNKRTQIFPPG

SEQ ID NO: 43359 - protein, 15 aa, BK virus
KKHLNKRTQIFPPGL

SEQ ID NO: 43360 - protein, 15 aa, BK virus
KHLNKRTQIFPPGLV

SEQ ID NO: 43361 - protein, 15 aa, BK virus
HLNKRTQIFPPGLVT

SEQ ID NO: 43362 - protein, 15 aa, BK virus
LNKRTQIFPPGLVTM

SEQ ID NO: 43363 - protein, 15 aa, BK virus
NKRTQIFPPGLVTMN

SEQ ID NO: 43364 - protein, 15 aa, BK virus
KRTQIFPPGLVTMNE

SEQ ID NO: 43365 - protein, 15 aa, BK virus
RTQIFPPGLVTMNEY

SEQ ID NO: 43366 - protein, 15 aa, BK virus
TQIFPPGLVTMNEYP

SEQ ID NO: 43367 - protein, 15 aa, BK virus
QIFPPGLVTMNEYPV

SEQ ID NO: 43368 - protein, 15 aa, BK virus
IFPPGLVTMNEYPVP

SEQ ID NO: 43369 - protein, 15 aa, BK virus
FPPGLVTMNEYPVPK

SEQ ID NO: 43370 - protein, 15 aa, BK virus
PPGLVTMNEYPVPKT

SEQ ID NO: 43371 - protein, 15 aa, BK virus
PGLVTMNEYPVPKTL

SEQ ID NO: 43372 - protein, 15 aa, BK virus
GLVTMNEYPVPKTLQ

SEQ ID NO: 43373 - protein, 15 aa, BK virus
LVTMNEYPVPKTLQA

SEQ ID NO: 43374 - protein, 15 aa, BK virus
VTMNEYPVPKTLQAR

SEQ ID NO: 43375 - protein, 15 aa, BK virus
TMNEYPVPKTLQARF

SEQ ID NO: 43376 - protein, 15 aa, BK virus
MNEYPVPKTLQARFV

SEQ ID NO: 43377 - protein, 15 aa, BK virus
NEYPVPKTLQARFVR

SEQ ID NO: 43378 - protein, 15 aa, BK virus
EYPVPKTLQARFVRQ

SEQ ID NO: 43379 - protein, 15 aa, BK virus
YPVPKTLQARFVRQI

SEQ ID NO: 43380 - protein, 15 aa, BK virus
PVPKTLQARFVRQID

SEQ ID NO: 43381 - protein, 15 aa, BK virus
VPKTLQARFVRQIDF

SEQ ID NO: 43382 - protein, 15 aa, BK virus
PKTLQARFVRQIDFR

SEQ ID NO: 43383 - protein, 15 aa, BK virus
KTLQARFVRQIDFRP

SEQ ID NO: 43384 - protein, 15 aa, BK virus
TLQARFVRQIDFRPK

SEQ ID NO: 43385 - protein, 15 aa, BK virus
LQARFVRQIDFRPKI

SEQ ID NO: 43386 - protein, 15 aa, BK virus
QARFVRQIDFRPKIY

SEQ ID NO: 43387 - protein, 15 aa, BK virus
ARFVRQIDFRPKIYL

SEQ ID NO: 43388 - protein, 15 aa, BK virus
RFVRQIDFRPKIYLR

SEQ ID NO: 43389 - protein, 15 aa, BK virus
FVRQIDFRPKIYLRK

SEQ ID NO: 43390 - protein, 15 aa, BK virus
VRQIDFRPKIYLRKS

SEQ ID NO: 43391 - protein, 15 aa, BK virus
RQIDFRPKIYLRKSL

SEQ ID NO: 43392 - protein, 15 aa, BK virus
QIDFRPKIYLRKSLQ

SEQ ID NO: 43393 - protein, 15 aa, BK virus
IDFRPKIYLRKSLQN

SEQ ID NO: 43394 - protein, 15 aa, BK virus
DFRPKIYLRKSLQNS

SEQ ID NO: 43395 - protein, 15 aa, BK virus
FRPKIYLRKSLQNSE

SEQ ID NO: 43396 - protein, 15 aa, BK virus
RPKIYLRKSLQNSEF

SEQ ID NO: 43397 - protein, 15 aa, BK virus
PKIYLRKSLQNSEFL

SEQ ID NO: 43398 - protein, 15 aa, BK virus
KIYLRKSLQNSEFLL

SEQ ID NO: 43399 - protein, 15 aa, BK virus
IYLRKSLQNSEFLLE

SEQ ID NO: 43400 - protein, 15 aa, BK virus
YLRKSLQNSEFLLEK

SEQ ID NO: 43401 - protein, 15 aa, BK virus
LRKSLQNSEFLLEKR

SEQ ID NO: 43402 - protein, 15 aa, BK virus
RKSLQNSEFLLEKRI

SEQ ID NO: 43403 - protein, 15 aa, BK virus
KSLQNSEFLLEKRIL

SEQ ID NO: 43404 - protein, 15 aa, BK virus
SLQNSEFLLEKRILQ

SEQ ID NO: 43405 - protein, 15 aa, BK virus
LQNSEFLLEKRILQS

SEQ ID NO: 43406 - protein, 15 aa, BK virus
QNSEFLLEKRILQSG

SEQ ID NO: 43407 - protein, 15 aa, BK virus
NSEFLLEKRILQSGM

SEQ ID NO: 43408 - protein, 15 aa, BK virus
SEFLLEKRILQSGMT

SEQ ID NO: 43409 - protein, 15 aa, BK virus
EFLLEKRILQSGMTL

SEQ ID NO: 43410 - protein, 15 aa, BK virus
FLLEKRILQSGMTLL

SEQ ID NO: 43411 - protein, 15 aa, BK virus
LLEKRILQSGMTLLL

SEQ ID NO: 43412 - protein, 15 aa, BK virus
LEKRILQSGMTLLLL

SEQ ID NO: 43413 - protein, 15 aa, BK virus
EKRILQSGMTLLLLL

SEQ ID NO: 43414 - protein, 15 aa, BK virus
KRILQSGMTLLLLLI

SEQ ID NO: 43415 - protein, 15 aa, BK virus
RILQSGMTLLLLLIW

SEQ ID NO: 43416 - protein, 15 aa, BK virus
ILQSGMTLLLLLIWF

SEQ ID NO: 43417 - protein, 15 aa, BK virus
LQSGMTLLLLLIWFR

SEQ ID NO: 43418 - protein, 15 aa, BK virus
QSGMTLLLLLIWFRP

SEQ ID NO: 43419 - protein, 15 aa, BK virus
SGMTLLLLLIWFRPV

SEQ ID NO: 43420 - protein, 15 aa, BK virus
GMTLLLLLIWFRPVA

SEQ ID NO: 43421 - protein, 15 aa, BK virus
MTLLLLLIWFRPVAD

SEQ ID NO: 43422 - protein, 15 aa, BK virus
TLLLLLIWFRPVADF

SEQ ID NO: 43423 - protein, 15 aa, BK virus
LLLLLIWFRPVADFA

SEQ ID NO: 43424 - protein, 15 aa, BK virus
LLLLIWFRPVADFAT

SEQ ID NO: 43425 - protein, 15 aa, BK virus
LLLIWFRPVADFATD

SEQ ID NO: 43426 - protein, 15 aa, BK virus
LLIWFRPVADFATDI

SEQ ID NO: 43427 - protein, 15 aa, BK virus
LIWFRPVADFATDIQ

SEQ ID NO: 43428 - protein, 15 aa, BK virus
IWFRPVADFATDIQS

SEQ ID NO: 43429 - protein, 15 aa, BK virus
WFRPVADFATDIQSR

SEQ ID NO: 43430 - protein, 15 aa, BK virus
FRPVADFATDIQSRI

SEQ ID NO: 43431 - protein, 15 aa, BK virus
RPVADFATDIQSRIV

SEQ ID NO: 43432 - protein, 15 aa, BK virus
PVADFATDIQSRIVE

SEQ ID NO: 43433 - protein, 15 aa, BK virus
VADFATDIQSRIVEW

SEQ ID NO: 43434 - protein, 15 aa, BK virus
ADFATDIQSRIVEWK

SEQ ID NO: 43435 - protein, 15 aa, BK virus
DFATDIQSRIVEWKE

SEQ ID NO: 43436 - protein, 15 aa, BK virus
FATDIQSRIVEWKER

SEQ ID NO: 43437 - protein, 15 aa, BK virus
ATDIQSRIVEWKERL

SEQ ID NO: 43438 - protein, 15 aa, BK virus
TDIQSRIVEWKERLD

SEQ ID NO: 43439 - protein, 15 aa, BK virus
DIQSRIVEWKERLDS

SEQ ID NO: 43440 - protein, 15 aa, BK virus
IQSRIVEWKERLDSE

SEQ ID NO: 43441 - protein, 15 aa, BK virus
QSRIVEWKERLDSEI

SEQ ID NO: 43442 - protein, 15 aa, BK virus
SRIVEWKERLDSEIS

SEQ ID NO: 43443 - protein, 15 aa, BK virus
RIVEWKERLDSEISM

SEQ ID NO: 43444 - protein, 15 aa, BK virus
IVEWKERLDSEISMY

SEQ ID NO: 43445 - protein, 15 aa, BK virus
VEWKERLDSEISMYT

SEQ ID NO: 43446 - protein, 15 aa, BK virus
EWKERLDSEISMYTF

SEQ ID NO: 43447 - protein, 15 aa, BK virus
WKERLDSEISMYTFS

SEQ ID NO: 43448 - protein, 15 aa, BK virus
KERLDSEISMYTFSR

SEQ ID NO: 43449 - protein, 15 aa, BK virus
ERLDSEISMYTFSRM

SEQ ID NO: 43450 - protein, 15 aa, BK virus
RLDSEISMYTFSRMK

SEQ ID NO: 43451 - protein, 15 aa, BK virus
LDSEISMYTFSRMKY

SEQ ID NO: 43452 - protein, 15 aa, BK virus
DSEISMYTFSRMKYN

SEQ ID NO: 43453 - protein, 15 aa, BK virus
SEISMYTFSRMKYNI

SEQ ID NO: 43454 - protein, 15 aa, BK virus
EISMYTFSRMKYNIC

SEQ ID NO: 43455 - protein, 15 aa, BK virus
ISMYTFSRMKYNICM

SEQ ID NO: 43456 - protein, 15 aa, BK virus
SMYTFSRMKYNICMG

SEQ ID NO: 43457 - protein, 15 aa, BK virus
MYTFSRMKYNICMGK

SEQ ID NO: 43458 - protein, 15 aa, BK virus
YTFSRMKYNICMGKC

SEQ ID NO: 43459 - protein, 15 aa, BK virus
TFSRMKYNICMGKCI

SEQ ID NO: 43460 - protein, 15 aa, BK virus
FSRMKYNICMGKCIL

SEQ ID NO: 43461 - protein, 15 aa, BK virus
SRMKYNICMGKCILD

SEQ ID NO: 43462 - protein, 15 aa, BK virus
RMKYNICMGKCILDI

SEQ ID NO: 43463 - protein, 15 aa, BK virus
MKYNICMGKCILDIT

SEQ ID NO: 43464 - protein, 15 aa, BK virus
KYNICMGKCILDITR

SEQ ID NO: 43465 - protein, 15 aa, BK virus
YNICMGKCILDITRE

SEQ ID NO: 43466 - protein, 15 aa, BK virus
NICMGKCILDITREE

SEQ ID NO: 43467 - protein, 15 aa, BK virus
ICMGKCILDITREED

SEQ ID NO: 43468 - protein, 15 aa, BK virus
CMGKCILDITREEDS

SEQ ID NO: 43469 - protein, 15 aa, BK virus
MGKCILDITREEDSE

SEQ ID NO: 43470 - protein, 15 aa, BK virus
GKCILDITREEDSET

SEQ ID NO: 43471 - protein, 15 aa, BK virus
KCILDITREEDSETE

SEQ ID NO: 43472 - protein, 15 aa, BK virus
CILDITREEDSETED

SEQ ID NO: 43473 - protein, 15 aa, BK virus
ILDITREEDSETEDS

SEQ ID NO: 43474 - protein, 15 aa, BK virus
LDITREEDSETEDSG

SEQ ID NO: 43475 - protein, 15 aa, BK virus
DITREEDSETEDSGH

SEQ ID NO: 43476 - protein, 15 aa, BK virus
ITREEDSETEDSGHG

SEQ ID NO: 43477 - protein, 15 aa, BK virus
TREEDSETEDSGHGS

SEQ ID NO: 43478 - protein, 15 aa, BK virus
REEDSETEDSGHGSS

SEQ ID NO: 43479 - protein, 15 aa, BK virus
EEDSETEDSGHGSST

SEQ ID NO: 43480 - protein, 15 aa, BK virus
EDSETEDSGHGSSTE

SEQ ID NO: 43481 - protein, 15 aa, BK virus
DSETEDSGHGSSTES

SEQ ID NO: 43482 - protein, 15 aa, BK virus
SETEDSGHGSSTESQ

SEQ ID NO: 43483 - protein, 15 aa, BK virus
ETEDSGHGSSTESQS

SEQ ID NO: 43484 - protein, 15 aa, BK virus
TEDSGHGSSTESQSQ

SEQ ID NO: 43485 - protein, 15 aa, BK virus
EDSGHGSSTESQSQC

SEQ ID NO: 43486 - protein, 15 aa, BK virus
DSGHGSSTESQSQCS

SEQ ID NO: 43487 - protein, 15 aa, BK virus
SGHGSSTESQSQCSS

SEQ ID NO: 43488 - protein, 15 aa, BK virus
GHGSSTESQSQCSSQ

SEQ ID NO: 43489 - protein, 15 aa, BK virus
HGSSTESQSQCSSQV

SEQ ID NO: 43490 - protein, 15 aa, BK virus
GSSTESQSQCSSQVS

SEQ ID NO: 43491 - protein, 15 aa, BK virus
SSTESQSQCSSQVSD

SEQ ID NO: 43492 - protein, 15 aa, BK virus
STESQSQCSSQVSDT

SEQ ID NO: 43493 - protein, 15 aa, BK virus
TESQSQCSSQVSDTS

SEQ ID NO: 43494 - protein, 15 aa, BK virus
ESQSQCSSQVSDTSA

SEQ ID NO: 43495 - protein, 15 aa, BK virus
SQSQCSSQVSDTSAP

SEQ ID NO: 43496 - protein, 15 aa, BK virus
QSQCSSQVSDTSAPA

SEQ ID NO: 43497 - protein, 15 aa, BK virus
SQCSSQVSDTSAPAE

SEQ ID NO: 43498 - protein, 15 aa, BK virus
QCSSQVSDTSAPAED

SEQ ID NO: 43499 - protein, 15 aa, BK virus
CSSQVSDTSAPAEDS

SEQ ID NO: 43500 - protein, 15 aa, BK virus
SSQVSDTSAPAEDSQ

SEQ ID NO: 43501 - protein, 15 aa, BK virus
SQVSDTSAPAEDSQR

SEQ ID NO: 43502 - protein, 15 aa, BK virus
QVSDTSAPAEDSQRS

SEQ ID NO: 43503 - protein, 15 aa, BK virus
VSDTSAPAEDSQRSD

SEQ ID NO: 43504 - protein, 15 aa, BK virus
SDTSAPAEDSQRSDP

SEQ ID NO: 43505 - protein, 15 aa, BK virus
DTSAPAEDSQRSDPH

SEQ ID NO: 43506 - protein, 15 aa, BK virus
TSAPAEDSQRSDPHS

SEQ ID NO: 43507 - protein, 15 aa, BK virus
SAPAEDSQRSDPHSQ

SEQ ID NO: 43508 - protein, 15 aa, BK virus
APAEDSQRSDPHSQE

SEQ ID NO: 43509 - protein, 15 aa, BK virus
PAEDSQRSDPHSQEL

SEQ ID NO: 43510 - protein, 15 aa, BK virus
AEDSQRSDPHSQELH

SEQ ID NO: 43511 - protein, 15 aa, BK virus
EDSQRSDPHSQELHL

SEQ ID NO: 43512 - protein, 15 aa, BK virus
DSQRSDPHSQELHLC

SEQ ID NO: 43513 - protein, 15 aa, BK virus
SQRSDPHSQELHLCK

SEQ ID NO: 43514 - protein, 15 aa, BK virus
QRSDPHSQELHLCKG

SEQ ID NO: 43515 - protein, 15 aa, BK virus
RSDPHSQELHLCKGF

SEQ ID NO: 43516 - protein, 15 aa, BK virus
SDPHSQELHLCKGFQ

SEQ ID NO: 43517 - protein, 15 aa, BK virus
DPHSQELHLCKGFQC

SEQ ID NO: 43518 - protein, 15 aa, BK virus
PHSQELHLCKGFQCF

SEQ ID NO: 43519 - protein, 15 aa, BK virus
HSQELHLCKGFQCFK

SEQ ID NO: 43520 - protein, 15 aa, BK virus
SQELHLCKGFQCFKR

SEQ ID NO: 43521 - protein, 15 aa, BK virus
QELHLCKGFQCFKRP

SEQ ID NO: 43522 - protein, 15 aa, BK virus
ELHLCKGFQCFKRPK

SEQ ID NO: 43523 - protein, 15 aa, BK virus
LHLCKGFQCFKRPKT

SEQ ID NO: 43524 - protein, 15 aa, BK virus
HLCKGFQCFKRPKTP

SEQ ID NO: 43525 - protein, 15 aa, BK virus
LCKGFQCFKRPKTPP

SEQ ID NO: 43526 - protein, 15 aa, BK virus
CKGFQCFKRPKTPPP

SEQ ID NO: 43527 - protein, 15 aa, BK virus
KGFQCFKRPKTPPPK

SEQ ID NO: 43528 - protein, 15 aa, BK virus
MYMYNKSTCLKHFGL

SEQ ID NO: 43529 - protein, 15 aa, BK virus
YMYNKSTCLKHFGLQ

SEQ ID NO: 43530 - protein, 15 aa, BK virus
MYNKSTCLKHFGLQL

SEQ ID NO: 43531 - protein, 15 aa, BK virus
YNKSTCLKHFGLQLS

SEQ ID NO: 43532 - protein, 15 aa, BK virus
NKSTCLKHFGLQLSL

SEQ ID NO: 43533 - protein, 15 aa, BK virus
KSTCLKHFGLQLSLF

SEQ ID NO: 43534 - protein, 15 aa, BK virus
STCLKHFGLQLSLFV

SEQ ID NO: 43535 - protein, 15 aa, BK virus
TCLKHFGLQLSLFVN

SEQ ID NO: 43536 - protein, 15 aa, BK virus
CLKHFGLQLSLFVNI

SEQ ID NO: 43537 - protein, 15 aa, BK virus
LKHFGLQLSLFVNIS

SEQ ID NO: 43538 - protein, 15 aa, BK virus
KHFGLQLSLFVNISY

SEQ ID NO: 43539 - protein, 15 aa, BK virus
HFGLQLSLFVNISYH

SEQ ID NO: 43540 - protein, 15 aa, BK virus
FGLQLSLFVNISYHI

SEQ ID NO: 43541 - protein, 15 aa, BK virus
GLQLSLFVNISYHIW

SEQ ID NO: 43542 - protein, 15 aa, BK virus
LQLSLFVNISYHIWV

SEQ ID NO: 43543 - protein, 15 aa, BK virus
QLSLFVNISYHIWVP

SEQ ID NO: 43544 - protein, 15 aa, BK virus
LSLFVNISYHIWVPW

SEQ ID NO: 43545 - protein, 15 aa, BK virus
SLFVNISYHIWVPWK

SEQ ID NO: 43546 - protein, 15 aa, BK virus
LFVNISYHIWVPWKS

SEQ ID NO: 43547 - protein, 15 aa, BK virus
FVNISYHIWVPWKSF

SEQ ID NO: 43548 - protein, 15 aa, BK virus
VNISYHIWVPWKSFC

SEQ ID NO: 43549 - protein, 15 aa, BK virus
NISYHIWVPWKSFCA

SEQ ID NO: 43550 - protein, 15 aa, BK virus
ISYHIWVPWKSFCAI

SEQ ID NO: 43551 - protein, 15 aa, BK virus
SYHIWVPWKSFCAIK

SEQ ID NO: 43552 - protein, 15 aa, BK virus
YHIWVPWKSFCAIKH

SEQ ID NO: 43553 - protein, 15 aa, BK virus
HIWVPWKSFCAIKHP

SEQ ID NO: 43554 - protein, 15 aa, BK virus
IWVPWKSFCAIKHPN

SEQ ID NO: 43555 - protein, 15 aa, BK virus
WVPWKSFCAIKHPNL

SEQ ID NO: 43556 - protein, 15 aa, BK virus
VPWKSFCAIKHPNLF

SEQ ID NO: 43557 - protein, 15 aa, BK virus
PWKSFCAIKHPNLFY

SEQ ID NO: 43558 - protein, 15 aa, BK virus
WKSFCAIKHPNLFYL

SEQ ID NO: 43559 - protein, 15 aa, BK virus
KSFCAIKHPNLFYLG

SEQ ID NO: 43560 - protein, 15 aa, BK virus
SFCAIKHPNLFYLGF

SEQ ID NO: 43561 - protein, 15 aa, BK virus
FCAIKHPNLFYLGFH

SEQ ID NO: 43562 - protein, 15 aa, BK virus
CAIKHPNLFYLGFHT

SEQ ID NO: 43563 - protein, 15 aa, BK virus
AIKHPNLFYLGFHTI

SEQ ID NO: 43564 - protein, 15 aa, BK virus
IKHPNLFYLGFHTIH

SEQ ID NO: 43565 - protein, 15 aa, BK virus
KHPNLFYLGFHTIHR

SEQ ID NO: 43566 - protein, 15 aa, BK virus
HPNLFYLGFHTIHRL

SEQ ID NO: 43567 - protein, 15 aa, BK virus
PNLFYLGFHTIHRLP

SEQ ID NO: 43568 - protein, 15 aa, BK virus
NLFYLGFHTIHRLPI

SEQ ID NO: 43569 - protein, 15 aa, BK virus
LFYLGFHTIHRLPIH

SEQ ID NO: 43570 - protein, 15 aa, BK virus
FYLGFHTIHRLPIHS

SEQ ID NO: 43571 - protein, 15 aa, BK virus
YLGFHTIHRLPIHSL

SEQ ID NO: 43572 - protein, 15 aa, BK virus
LGFHTIHRLPIHSLG

SEQ ID NO: 43573 - protein, 15 aa, BK virus
GFHTIHRLPIHSLGS

SEQ ID NO: 43574 - protein, 15 aa, BK virus
FHTIHRLPIHSLGSP

SEQ ID NO: 43575 - protein, 15 aa, BK virus
HTIHRLPIHSLGSPV

SEQ ID NO: 43576 - protein, 15 aa, BK virus
TIHRLPIHSLGSPVY

SEQ ID NO: 43577 - protein, 15 aa, BK virus
IHRLPIHSLGSPVYK

SEQ ID NO: 43578 - protein, 15 aa, BK virus
HRLPIHSLGSPVYKV

SEQ ID NO: 43579 - protein, 15 aa, BK virus
RLPIHSLGSPVYKVT

SEQ ID NO: 43580 - protein, 15 aa, BK virus
QKGNWVRILYRSFSQ

SEQ ID NO: 43581 - protein, 15 aa, BK virus
KGNWVRILYRSFSQA

SEQ ID NO: 43582 - protein, 15 aa, BK virus
GNWVRILYRSFSQAD

SEQ ID NO: 43583 - protein, 15 aa, BK virus
NWVRILYRSFSQADL

SEQ ID NO: 43584 - protein, 15 aa, BK virus
WVRILYRSFSQADLK

SEQ ID NO: 43585 - protein, 15 aa, BK virus
VRILYRSFSQADLKI

SEQ ID NO: 43586 - protein, 15 aa, BK virus
RILYRSFSQADLKIS

SEQ ID NO: 43587 - protein, 15 aa, BK virus
ILYRSFSQADLKISC

SEQ ID NO: 43588 - protein, 15 aa, BK virus
LYRSFSQADLKISCK

SEQ ID NO: 43589 - protein, 15 aa, BK virus
YRSFSQADLKISCKA

SEQ ID NO: 43590 - protein, 15 aa, BK virus
RSFSQADLKISCKAS

SEQ ID NO: 43591 - protein, 15 aa, BK virus
SFSQADLKISCKASP

SEQ ID NO: 43592 - protein, 15 aa, BK virus
FSQADLKISCKASPL

SEQ ID NO: 43593 - protein, 15 aa, BK virus
SQADLKISCKASPLL

SEQ ID NO: 43594 - protein, 15 aa, BK virus
QADLKISCKASPLLC

SEQ ID NO: 43595 - protein, 15 aa, BK virus
ADLKISCKASPLLCS

SEQ ID NO: 43596 - protein, 15 aa, BK virus
DLKISCKASPLLCSR

SEQ ID NO: 43597 - protein, 15 aa, BK virus
LKISCKASPLLCSRA

SEQ ID NO: 43598 - protein, 15 aa, BK virus
KISCKASPLLCSRAV

SEQ ID NO: 43599 - protein, 15 aa, BK virus
ISCKASPLLCSRAVS

SEQ ID NO: 43600 - protein, 15 aa, BK virus
SCKASPLLCSRAVSK

SEQ ID NO: 43601 - protein, 15 aa, BK virus
CKASPLLCSRAVSKQ

SEQ ID NO: 43602 - protein, 15 aa, BK virus
KASPLLCSRAVSKQA

SEQ ID NO: 43603 - protein, 15 aa, BK virus
ASPLLCSRAVSKQAT

SEQ ID NO: 43604 - protein, 15 aa, BK virus
SPLLCSRAVSKQATN

SEQ ID NO: 43605 - protein, 15 aa, BK virus
PLLCSRAVSKQATNI

SEQ ID NO: 43606 - protein, 15 aa, BK virus
LLCSRAVSKQATNIS

SEQ ID NO: 43607 - protein, 15 aa, BK virus
LCSRAVSKQATNISS

SEQ ID NO: 43608 - protein, 15 aa, BK virus
NIQAISFTKRPHTLF

SEQ ID NO: 43609 - protein, 15 aa, BK virus
IQAISFTKRPHTLFI

SEQ ID NO: 43610 - protein, 15 aa, BK virus
QHCGSCVGHMKYWGN

SEQ ID NO: 43611 - protein, 15 aa, BK virus
HCGSCVGHMKYWGNI

SEQ ID NO: 43612 - protein, 15 aa, BK virus
CGSCVGHMKYWGNIF

SEQ ID NO: 43613 - protein, 15 aa, BK virus
GSCVGHMKYWGNIFP

SEQ ID NO: 43614 - protein, 15 aa, BK virus
SCVGHMKYWGNIFPS

SEQ ID NO: 43615 - protein, 15 aa, BK virus
CVGHMKYWGNIFPSC

SEQ ID NO: 43616 - protein, 15 aa, BK virus
VGHMKYWGNIFPSCE

SEQ ID NO: 43617 - protein, 15 aa, BK virus
GHMKYWGNIFPSCES

SEQ ID NO: 43618 - protein, 15 aa, BK virus
HMKYWGNIFPSCESP

SEQ ID NO: 43619 - protein, 15 aa, BK virus
MKYWGNIFPSCESPK

SEQ ID NO: 43620 - protein, 15 aa, BK virus
KYWGNIFPSCESPKI

SEQ ID NO: 43621 - protein, 15 aa, BK virus
YWGNIFPSCESPKIP

SEQ ID NO: 43622 - protein, 15 aa, BK virus
WGNIFPSCESPKIPS

SEQ ID NO: 43623 - protein, 15 aa, BK virus
GNIFPSCESPKIPSI

SEQ ID NO: 43624 - protein, 15 aa, BK virus
NIFPSCESPKIPSIF

SEQ ID NO: 43625 - protein, 15 aa, BK virus
IFPSCESPKIPSIFI

SEQ ID NO: 43626 - protein, 15 aa, BK virus
FPSCESPKIPSIFIS

SEQ ID NO: 43627 - protein, 15 aa, BK virus
PSCESPKIPSIFIST

SEQ ID NO: 43628 - protein, 15 aa, BK virus
SCESPKIPSIFISTG

SEQ ID NO: 43629 - protein, 15 aa, BK virus
CESPKIPSIFISTGI

SEQ ID NO: 43630 - protein, 15 aa, BK virus
ESPKIPSIFISTGIR

SEQ ID NO: 43631 - protein, 15 aa, BK virus
SPKIPSIFISTGIRY

SEQ ID NO: 43632 - protein, 15 aa, BK virus
PKIPSIFISTGIRYP

SEQ ID NO: 43633 - protein, 15 aa, BK virus
KIPSIFISTGIRYPA

SEQ ID NO: 43634 - protein, 15 aa, BK virus
IPSIFISTGIRYPAL

SEQ ID NO: 43635 - protein, 15 aa, BK virus
PSIFISTGIRYPALN

SEQ ID NO: 43636 - protein, 15 aa, BK virus
SIFISTGIRYPALNW

SEQ ID NO: 43637 - protein, 15 aa, BK virus
IFISTGIRYPALNWI

SEQ ID NO: 43638 - protein, 15 aa, BK virus
FISTGIRYPALNWIS

SEQ ID NO: 43639 - protein, 15 aa, BK virus
ISTGIRYPALNWISI

SEQ ID NO: 43640 - protein, 15 aa, BK virus
STGIRYPALNWISIV

SEQ ID NO: 43641 - protein, 15 aa, BK virus
TGIRYPALNWISIVF

SEQ ID NO: 43642 - protein, 15 aa, BK virus
GIRYPALNWISIVFV

SEQ ID NO: 43643 - protein, 15 aa, BK virus
IRYPALNWISIVFVQ

SEQ ID NO: 43644 - protein, 15 aa, BK virus
RYPALNWISIVFVQI

SEQ ID NO: 43645 - protein, 15 aa, BK virus
YPALNWISIVFVQIG

SEQ ID NO: 43646 - protein, 15 aa, BK virus
PALNWISIVFVQIGL

SEQ ID NO: 43647 - protein, 15 aa, BK virus
ALNWISIVFVQIGLM

SEQ ID NO: 43648 - protein, 15 aa, BK virus
LNWISIVFVQIGLMV

SEQ ID NO: 43649 - protein, 15 aa, BK virus
NWISIVFVQIGLMVS

SEQ ID NO: 43650 - protein, 15 aa, BK virus
WISIVFVQIGLMVSI

SEQ ID NO: 43651 - protein, 15 aa, BK virus
ISIVFVQIGLMVSIH

SEQ ID NO: 43652 - protein, 15 aa, BK virus
SIVFVQIGLMVSIHY

SEQ ID NO: 43653 - protein, 15 aa, BK virus
IVFVQIGLMVSIHYL

SEQ ID NO: 43654 - protein, 15 aa, BK virus
VFVQIGLMVSIHYLG

SEQ ID NO: 43655 - protein, 15 aa, BK virus
FVQIGLMVSIHYLGL

SEQ ID NO: 43656 - protein, 15 aa, BK virus
VQIGLMVSIHYLGLG

SEQ ID NO: 43657 - protein, 15 aa, BK virus
QIGLMVSIHYLGLGC

SEQ ID NO: 43658 - protein, 15 aa, BK virus
IGLMVSIHYLGLGCW

SEQ ID NO: 43659 - protein, 15 aa, BK virus
GLMVSIHYLGLGCWV

SEQ ID NO: 43660 - protein, 15 aa, BK virus
LMVSIHYLGLGCWVF

SEQ ID NO: 43661 - protein, 15 aa, BK virus
MVSIHYLGLGCWVFR

SEQ ID NO: 43662 - protein, 15 aa, BK virus
VSIHYLGLGCWVFRG

SEQ ID NO: 43663 - protein, 15 aa, BK virus
SIHYLGLGCWVFRGY

SEQ ID NO: 43664 - protein, 15 aa, BK virus
IHYLGLGCWVFRGYS

SEQ ID NO: 43665 - protein, 15 aa, BK virus
HYLGLGCWVFRGYST

SEQ ID NO: 43666 - protein, 15 aa, BK virus
YLGLGCWVFRGYSTI

SEQ ID NO: 43667 - protein, 15 aa, BK virus
LGLGCWVFRGYSTIR

SEQ ID NO: 43668 - protein, 15 aa, BK virus
GLGCWVFRGYSTIRV

SEQ ID NO: 43669 - protein, 15 aa, BK virus
LGCWVFRGYSTIRVL

SEQ ID NO: 43670 - protein, 15 aa, BK virus
HSLHFQGFSTYSKEV

SEQ ID NO: 43671 - protein, 15 aa, BK virus
SLHFQGFSTYSKEVE

SEQ ID NO: 43672 - protein, 15 aa, BK virus
LHFQGFSTYSKEVEI

SEQ ID NO: 43673 - protein, 15 aa, BK virus
HFQGFSTYSKEVEIT

SEQ ID NO: 43674 - protein, 15 aa, BK virus
FQGFSTYSKEVEITA

SEQ ID NO: 43675 - protein, 15 aa, BK virus
QGFSTYSKEVEITAL

SEQ ID NO: 43676 - protein, 15 aa, BK virus
GFSTYSKEVEITALN

SEQ ID NO: 43677 - protein, 15 aa, BK virus
FSTYSKEVEITALNR

SEQ ID NO: 43678 - protein, 15 aa, BK virus
STYSKEVEITALNRF

SEQ ID NO: 43679 - protein, 15 aa, BK virus
TYSKEVEITALNRFS

SEQ ID NO: 43680 - protein, 15 aa, BK virus
YSKEVEITALNRFSS

SEQ ID NO: 43681 - protein, 15 aa, BK virus
SKEVEITALNRFSST

SEQ ID NO: 43682 - protein, 15 aa, BK virus
KEVEITALNRFSSTM

SEQ ID NO: 43683 - protein, 15 aa, BK virus
EVEITALNRFSSTML

SEQ ID NO: 43684 - protein, 15 aa, BK virus
VEITALNRFSSTMLM

SEQ ID NO: 43685 - protein, 15 aa, BK virus
EITALNRFSSTMLMH

SEQ ID NO: 43686 - protein, 15 aa, BK virus
ITALNRFSSTMLMHF

SEQ ID NO: 43687 - protein, 15 aa, BK virus
TALNRFSSTMLMHFL

SEQ ID NO: 43688 - protein, 15 aa, BK virus
PCMKVKHASYSNNLC

SEQ ID NO: 43689 - protein, 15 aa, BK virus
CMKVKHASYSNNLCL

SEQ ID NO: 43690 - protein, 15 aa, BK virus
MKVKHASYSNNLCLY

SEQ ID NO: 43691 - protein, 15 aa, BK virus
KVKHASYSNNLCLYS

SEQ ID NO: 43692 - protein, 15 aa, BK virus
VKHASYSNNLCLYSY

SEQ ID NO: 43693 - protein, 15 aa, BK virus
KHASYSNNLCLYSYS

SEQ ID NO: 43694 - protein, 15 aa, BK virus
HASYSNNLCLYSYSL

SEQ ID NO: 43695 - protein, 15 aa, BK virus
ASYSNNLCLYSYSLP

SEQ ID NO: 43696 - protein, 15 aa, BK virus
SYSNNLCLYSYSLPH

SEQ ID NO: 43697 - protein, 15 aa, BK virus
YSNNLCLYSYSLPHQ

SEQ ID NO: 43698 - protein, 15 aa, BK virus
IGEGNSCCAVTGKHF

SEQ ID NO: 43699 - protein, 15 aa, BK virus
GEGNSCCAVTGKHFS

SEQ ID NO: 43700 - protein, 15 aa, BK virus
EGNSCCAVTGKHFSL

SEQ ID NO: 43701 - protein, 15 aa, BK virus
GNSCCAVTGKHFSLW

SEQ ID NO: 43702 - protein, 15 aa, BK virus
NSCCAVTGKHFSLWA

SEQ ID NO: 43703 - protein, 15 aa, BK virus
SCCAVTGKHFSLWAI

SEQ ID NO: 43704 - protein, 15 aa, BK virus
CCAVTGKHFSLWAIT

SEQ ID NO: 43705 - protein, 15 aa, BK virus
CAVTGKHFSLWAITA

SEQ ID NO: 43706 - protein, 15 aa, BK virus
AVTGKHFSLWAITAK

SEQ ID NO: 43707 - protein, 15 aa, BK virus
VTGKHFSLWAITAKV

SEQ ID NO: 43708 - protein, 15 aa, BK virus
TGKHFSLWAITAKVI

SEQ ID NO: 43709 - protein, 15 aa, BK virus
GKHFSLWAITAKVIF

SEQ ID NO: 43710 - protein, 15 aa, BK virus
KHFSLWAITAKVIFS

SEQ ID NO: 43711 - protein, 15 aa, BK virus
HFSLWAITAKVIFST

SEQ ID NO: 43712 - protein, 15 aa, BK virus
TKAPKVFIWIPHFWV

SEQ ID NO: 43713 - protein, 15 aa, BK virus
EAFYLCNSIYPSFNF

SEQ ID NO: 43714 - protein, 15 aa, BK virus
FWHLHGFLWLFGSCP

SEQ ID NO: 43715 - protein, 15 aa, BK virus
WHLHGFLWLFGSCPW

SEQ ID NO: 43716 - protein, 15 aa, BK virus
HLHGFLWLFGSCPWT

SEQ ID NO: 43717 - protein, 15 aa, BK virus
LHGFLWLFGSCPWTL

SEQ ID NO: 43718 - protein, 15 aa, BK virus
HGFLWLFGSCPWTLS

SEQ ID NO: 43719 - protein, 15 aa, BK virus
GFLWLFGSCPWTLSF

SEQ ID NO: 43720 - protein, 15 aa, BK virus
FLWLFGSCPWTLSFS

SEQ ID NO: 43721 - protein, 15 aa, BK virus
LWLFGSCPWTLSFSF

SEQ ID NO: 43722 - protein, 15 aa, BK virus
WLFGSCPWTLSFSFG

SEQ ID NO: 43723 - protein, 15 aa, BK virus
LFGSCPWTLSFSFGW

SEQ ID NO: 43724 - protein, 15 aa, BK virus
FGSCPWTLSFSFGWG

SEQ ID NO: 43725 - protein, 15 aa, BK virus
GSCPWTLSFSFGWGH

SEQ ID NO: 43726 - protein, 15 aa, BK virus
SCPWTLSFSFGWGHL

SEQ ID NO: 43727 - protein, 15 aa, BK virus
CPWTLSFSFGWGHLH

SEQ ID NO: 43728 - protein, 15 aa, BK virus
PWTLSFSFGWGHLHM

SEQ ID NO: 43729 - protein, 15 aa, BK virus
WTLSFSFGWGHLHML

SEQ ID NO: 43730 - protein, 15 aa, BK virus
TLSFSFGWGHLHMLQ

SEQ ID NO: 43731 - protein, 15 aa, BK virus
LSFSFGWGHLHMLQE

SEQ ID NO: 43732 - protein, 15 aa, BK virus
SFSFGWGHLHMLQEQ

SEQ ID NO: 43733 - protein, 15 aa, BK virus
FSFGWGHLHMLQEQV

SEQ ID NO: 43734 - protein, 15 aa, BK virus
SFGWGHLHMLQEQVL

SEQ ID NO: 43735 - protein, 15 aa, BK virus
FGWGHLHMLQEQVLQ

SEQ ID NO: 43736 - protein, 15 aa, BK virus
GWGHLHMLQEQVLQS

SEQ ID NO: 43737 - protein, 15 aa, BK virus
WGHLHMLQEQVLQSR

SEQ ID NO: 43738 - protein, 15 aa, BK virus
GHLHMLQEQVLQSRT

SEQ ID NO: 43739 - protein, 15 aa, BK virus
HLHMLQEQVLQSRTG

SEQ ID NO: 43740 - protein, 15 aa, BK virus
LHMLQEQVLQSRTGL

SEQ ID NO: 43741 - protein, 15 aa, BK virus
HMLQEQVLQSRTGLE

SEQ ID NO: 43742 - protein, 15 aa, BK virus
MLQEQVLQSRTGLEV

SEQ ID NO: 43743 - protein, 15 aa, BK virus
LQEQVLQSRTGLEVK

SEQ ID NO: 43744 - protein, 15 aa, BK virus
QEQVLQSRTGLEVKA

SEQ ID NO: 43745 - protein, 15 aa, BK virus
EQVLQSRTGLEVKAT

SEQ ID NO: 43746 - protein, 15 aa, BK virus
QVLQSRTGLEVKATS

SEQ ID NO: 43747 - protein, 15 aa, BK virus
VLQSRTGLEVKATSI

SEQ ID NO: 43748 - protein, 15 aa, BK virus
LQSRTGLEVKATSIE

SEQ ID NO: 43749 - protein, 15 aa, BK virus
QSRTGLEVKATSIEE

SEQ ID NO: 43750 - protein, 15 aa, BK virus
SRTGLEVKATSIEEQ

SEQ ID NO: 43751 - protein, 15 aa, BK virus
RTGLEVKATSIEEQF

SEQ ID NO: 43752 - protein, 15 aa, BK virus
TGLEVKATSIEEQFF

SEQ ID NO: 43753 - protein, 15 aa, BK virus
GLEVKATSIEEQFFD

SEQ ID NO: 43754 - protein, 15 aa, BK virus
TLLNVHFVDFLSPFF

SEQ ID NO: 43755 - protein, 15 aa, BK virus
LLNVHFVDFLSPFFV

SEQ ID NO: 43756 - protein, 15 aa, BK virus
LLLYCQHHLYYKYGQ

SEQ ID NO: 43757 - protein, 15 aa, BK virus
LLYCQHHLYYKYGQN

SEQ ID NO: 43758 - protein, 15 aa, BK virus
LYCQHHLYYKYGQNV

SEQ ID NO: 43759 - protein, 15 aa, BK virus
YCQHHLYYKYGQNVH

SEQ ID NO: 43760 - protein, 15 aa, BK virus
CQHHLYYKYGQNVHG

SEQ ID NO: 43761 - protein, 15 aa, BK virus
QHHLYYKYGQNVHGY

SEQ ID NO: 43762 - protein, 15 aa, BK virus
HHLYYKYGQNVHGYL

SEQ ID NO: 43763 - protein, 15 aa, BK virus
HLYYKYGQNVHGYLP

SEQ ID NO: 43764 - protein, 15 aa, BK virus
LYYKYGQNVHGYLPF

SEQ ID NO: 43765 - protein, 15 aa, BK virus
YYKYGQNVHGYLPFQ

SEQ ID NO: 43766 - protein, 15 aa, BK virus
YKYGQNVHGYLPFQL

SEQ ID NO: 43767 - protein, 15 aa, BK virus
KYGQNVHGYLPFQLL

SEQ ID NO: 43768 - protein, 15 aa, BK virus
YGQNVHGYLPFQLLV

SEQ ID NO: 43769 - protein, 15 aa, BK virus
GKDQNNIVEYNYKSL

SEQ ID NO: 43770 - protein, 15 aa, BK virus
QKYLHQETEYHSTHL

SEQ ID NO: 43771 - protein, 15 aa, BK virus
KYLHQETEYHSTHLG

SEQ ID NO: 43772 - protein, 15 aa, BK virus
TIPKPCLIADRGLQW

SEQ ID NO: 43773 - protein, 15 aa, BK virus
IPKPCLIADRGLQWK

SEQ ID NO: 43774 - protein, 15 aa, BK virus
PKPCLIADRGLQWKL

SEQ ID NO: 43775 - protein, 15 aa, BK virus
KPCLIADRGLQWKLC

SEQ ID NO: 43776 - protein, 15 aa, BK virus
PCLIADRGLQWKLCD

SEQ ID NO: 43777 - protein, 15 aa, BK virus
CLIADRGLQWKLCDP

SEQ ID NO: 43778 - protein, 15 aa, BK virus
LIADRGLQWKLCDPN

SEQ ID NO: 43779 - protein, 15 aa, BK virus
IADRGLQWKLCDPNH

SEQ ID NO: 43780 - protein, 15 aa, BK virus
ADRGLQWKLCDPNHQ

SEQ ID NO: 43781 - protein, 15 aa, BK virus
DRGLQWKLCDPNHQR

SEQ ID NO: 43782 - protein, 15 aa, BK virus
RGLQWKLCDPNHQRT

SEQ ID NO: 43783 - protein, 15 aa, BK virus
GLQWKLCDPNHQRTY

SEQ ID NO: 43784 - protein, 15 aa, BK virus
LQWKLCDPNHQRTYT

SEQ ID NO: 43785 - protein, 15 aa, BK virus
QWKLCDPNHQRTYTL

SEQ ID NO: 43786 - protein, 15 aa, BK virus
WKLCDPNHQRTYTLL

SEQ ID NO: 43787 - protein, 15 aa, BK virus
KLCDPNHQRTYTLLE

SEQ ID NO: 43788 - protein, 15 aa, BK virus
LCDPNHQRTYTLLEL

SEQ ID NO: 43789 - protein, 15 aa, BK virus
CDPNHQRTYTLLELR

SEQ ID NO: 43790 - protein, 15 aa, BK virus
DPNHQRTYTLLELRN

SEQ ID NO: 43791 - protein, 15 aa, BK virus
PQEHQQLQHMFEELG

SEQ ID NO: 43792 - protein, 15 aa, BK virus
QEHQQLQHMFEELGL

SEQ ID NO: 43793 - protein, 15 aa, BK virus
QQQPPQQQFQPLKIL

SEQ ID NO: 43794 - protein, 15 aa, BK virus
QQPPQQQFQPLKILW

SEQ ID NO: 43795 - protein, 15 aa, BK virus
QPPQQQFQPLKILWQ

SEQ ID NO: 43796 - protein, 15 aa, BK virus
PPQQQFQPLKILWQQ

SEQ ID NO: 43797 - protein, 15 aa, BK virus
PQQQFQPLKILWQQQ

SEQ ID NO: 43798 - protein, 15 aa, BK virus
QQQFQPLKILWQQQP

SEQ ID NO: 43799 - protein, 15 aa, BK virus
QQFQPLKILWQQQPQ

SEQ ID NO: 43800 - protein, 15 aa, BK virus
QFQPLKILWQQQPQI

SEQ ID NO: 43801 - protein, 15 aa, BK virus
FQPLKILWQQQPQIH

SEQ ID NO: 43802 - protein, 15 aa, BK virus
QPLKILWQQQPQIHW

SEQ ID NO: 43803 - protein, 15 aa, BK virus
PLKILWQQQPQIHWQ

SEQ ID NO: 43804 - protein, 15 aa, BK virus
LKILWQQQPQIHWQL

SEQ ID NO: 43805 - protein, 15 aa, BK virus
KILWQQQPQIHWQLG

SEQ ID NO: 43806 - protein, 15 aa, BK virus
ILWQQQPQIHWQLGP

SEQ ID NO: 43807 - protein, 15 aa, BK virus
LWQQQPQIHWQLGPP

SEQ ID NO: 43808 - protein, 15 aa, BK virus
WQQQPQIHWQLGPPK

SEQ ID NO: 43809 - protein, 15 aa, BK virus
QQQPQIHWQLGPPKV

SEQ ID NO: 43810 - protein, 15 aa, BK virus
QQPQIHWQLGPPKVL

SEQ ID NO: 43811 - protein, 15 aa, BK virus
QPQIHWQLGPPKVLE

SEQ ID NO: 43812 - protein, 15 aa, BK virus
PQIHWQLGPPKVLEQ

SEQ ID NO: 43813 - protein, 15 aa, BK virus
QIHWQLGPPKVLEQH

SEQ ID NO: 43814 - protein, 15 aa, BK virus
IHWQLGPPKVLEQHP

SEQ ID NO: 43815 - protein, 15 aa, BK virus
TWKYKKKGITYLGVF

SEQ ID NO: 43816 - protein, 15 aa, BK virus
WKYKKKGITYLGVFY

SEQ ID NO: 43817 - protein, 15 aa, BK virus
KYKKKGITYLGVFYR

SEQ ID NO: 43818 - protein, 15 aa, BK virus
YKKKGITYLGVFYRV

SEQ ID NO: 43819 - protein, 15 aa, BK virus
KKKGITYLGVFYRVF

SEQ ID NO: 43820 - protein, 15 aa, BK virus
KKGITYLGVFYRVFY

SEQ ID NO: 43821 - protein, 15 aa, BK virus
KGITYLGVFYRVFYS

SEQ ID NO: 43822 - protein, 15 aa, BK virus
GITYLGVFYRVFYSR

SEQ ID NO: 43823 - protein, 15 aa, BK virus
SSGTFVFPVYTVFTS

SEQ ID NO: 43824 - protein, 15 aa, BK virus
SGTFVFPVYTVFTST

SEQ ID NO: 43825 - protein, 15 aa, BK virus
GTFVFPVYTVFTSTK

SEQ ID NO: 43826 - protein, 15 aa, BK virus
TFVFPVYTVFTSTKF

SEQ ID NO: 43827 - protein, 15 aa, BK virus
FVFPVYTVFTSTKFQ

SEQ ID NO: 43828 - protein, 15 aa, BK virus
VFPVYTVFTSTKFQQ

SEQ ID NO: 43829 - protein, 15 aa, BK virus
FPVYTVFTSTKFQQK

SEQ ID NO: 43830 - protein, 15 aa, BK virus
PVYTVFTSTKFQQKL

SEQ ID NO: 43831 - protein, 15 aa, BK virus
NKNKNPLSSFFCSSP

SEQ ID NO: 43832 - protein, 15 aa, BK virus
KNKNPLSSFFCSSPG

SEQ ID NO: 43833 - protein, 15 aa, BK virus
NKNPLSSFFCSSPGF

SEQ ID NO: 43834 - protein, 15 aa, BK virus
KNPLSSFFCSSPGFT

SEQ ID NO: 43835 - protein, 15 aa, BK virus
NPLSSFFCSSPGFTN

SEQ ID NO: 43836 - protein, 15 aa, BK virus
PLSSFFCSSPGFTNF

SEQ ID NO: 43837 - protein, 15 aa, BK virus
LSSFFCSSPGFTNFH

SEQ ID NO: 43838 - protein, 15 aa, BK virus
LGTRPRFLGSQNMSV

SEQ ID NO: 43839 - protein, 15 aa, BK virus
GTRPRFLGSQNMSVM

SEQ ID NO: 43840 - protein, 15 aa, BK virus
TRPRFLGSQNMSVMH

SEQ ID NO: 43841 - protein, 15 aa, BK virus
RPRFLGSQNMSVMHF

SEQ ID NO: 43842 - protein, 15 aa, BK virus
PRFLGSQNMSVMHFP

SEQ ID NO: 43843 - protein, 15 aa, BK virus
RFLGSQNMSVMHFPS

SEQ ID NO: 43844 - protein, 15 aa, BK virus
AAPPCESCTFLPEVM

SEQ ID NO: 43845 - protein, 15 aa, BK virus
APPCESCTFLPEVMV

SEQ ID NO: 43846 - protein, 15 aa, BK virus
PPCESCTFLPEVMVW

SEQ ID NO: 43847 - protein, 15 aa, BK virus
PCESCTFLPEVMVWL

SEQ ID NO: 43848 - protein, 15 aa, BK virus
CESCTFLPEVMVWLH

SEQ ID NO: 43849 - protein, 15 aa, BK virus
ESCTFLPEVMVWLHS

SEQ ID NO: 43850 - protein, 15 aa, BK virus
SCTFLPEVMVWLHSP

SEQ ID NO: 43851 - protein, 15 aa, BK virus
CTFLPEVMVWLHSPV

SEQ ID NO: 43852 - protein, 15 aa, BK virus
TFLPEVMVWLHSPVS

SEQ ID NO: 43853 - protein, 15 aa, BK virus
FLPEVMVWLHSPVSH

SEQ ID NO: 43854 - protein, 15 aa, BK virus
LPEVMVWLHSPVSHA

SEQ ID NO: 43855 - protein, 15 aa, BK virus
PEVMVWLHSPVSHAL

SEQ ID NO: 43856 - protein, 15 aa, BK virus
EVMVWLHSPVSHALS

SEQ ID NO: 43857 - protein, 15 aa, BK virus
VMVWLHSPVSHALSF

SEQ ID NO: 43858 - protein, 15 aa, BK virus
MVWLHSPVSHALSFL

SEQ ID NO: 43859 - protein, 15 aa, BK virus
VWLHSPVSHALSFLR

SEQ ID NO: 43860 - protein, 15 aa, BK virus
WLHSPVSHALSFLRS

SEQ ID NO: 43861 - protein, 15 aa, BK virus
LHSPVSHALSFLRSW

SEQ ID NO: 43862 - protein, 15 aa, BK virus
HSPVSHALSFLRSWF

SEQ ID NO: 43863 - protein, 15 aa, BK virus
SPVSHALSFLRSWFG

SEQ ID NO: 43864 - protein, 15 aa, BK virus
PVSHALSFLRSWFGC

SEQ ID NO: 43865 - protein, 15 aa, BK virus
VSHALSFLRSWFGCI

SEQ ID NO: 43866 - protein, 15 aa, BK virus
SHALSFLRSWFGCIP

SEQ ID NO: 43867 - protein, 15 aa, BK virus
HALSFLRSWFGCIPW

SEQ ID NO: 43868 - protein, 15 aa, BK virus
ALSFLRSWFGCIPWV

SEQ ID NO: 43869 - protein, 15 aa, BK virus
LSFLRSWFGCIPWVS

SEQ ID NO: 43870 - protein, 15 aa, BK virus
SFLRSWFGCIPWVSS

SEQ ID NO: 43871 - protein, 15 aa, BK virus
FLRSWFGCIPWVSSS

SEQ ID NO: 43872 - protein, 15 aa, BK virus
LRSWFGCIPWVSSSS

SEQ ID NO: 43873 - protein, 15 aa, BK virus
RSWFGCIPWVSSSSL

SEQ ID NO: 43874 - protein, 15 aa, BK virus
SWFGCIPWVSSSSLW

SEQ ID NO: 43875 - protein, 15 aa, BK virus
WFGCIPWVSSSSLWP

SEQ ID NO: 43876 - protein, 15 aa, BK virus
FGCIPWVSSSSLWPF

SEQ ID NO: 43877 - protein, 15 aa, BK virus
GCIPWVSSSSLWPFF

SEQ ID NO: 43878 - protein, 15 aa, BK virus
CIPWVSSSSLWPFFL

SEQ ID NO: 43879 - protein, 15 aa, BK virus
YIRGRGRLCLHPFSQ

SEQ ID NO: 43880 - protein, 15 aa, BK virus
IRGRGRLCLHPFSQV

SEQ ID NO: 43881 - protein, 15 aa, BK virus
RGRGRLCLHPFSQVV

SEQ ID NO: 43882 - protein, 15 aa, BK virus
GRGRLCLHPFSQVVR

SEQ ID NO: 43883 - protein, 15 aa, BK virus
RGRLCLHPFSQVVRV

SEQ ID NO: 43884 - protein, 15 aa, BK virus
GRLCLHPFSQVVRVW

SEQ ID NO: 43885 - protein, 15 aa, BK virus
RLCLHPFSQVVRVWR

SEQ ID NO: 43886 - protein, 15 aa, BK virus
LCLHPFSQVVRVWRL

SEQ ID NO: 43887 - protein, 15 aa, BK virus
CLHPFSQVVRVWRLF

SEQ ID NO: 43888 - protein, 15 aa, BK virus
LHPFSQVVRVWRLFL

SEQ ID NO: 43889 - protein, 15 aa, BK virus
HPFSQVVRVWRLFLR

SEQ ID NO: 43890 - protein, 15 aa, BK virus
PFSQVVRVWRLFLRP

SEQ ID NO: 43891 - protein, 15 aa, BK virus
FSQVVRVWRLFLRPS

SEQ ID NO: 43892 - protein, 15 aa, BK virus
SQVVRVWRLFLRPSK

SEQ ID NO: 43893 - protein, 15 aa, BK virus
QVVRVWRLFLRPSKT

SEQ ID NO: 43894 - protein, 15 aa, BK virus
VVRVWRLFLRPSKTI

SEQ ID NO: 43895 - protein, 15 aa, BK virus
VRVWRLFLRPSKTIW

SEQ ID NO: 43896 - protein, 15 aa, BK virus
RVWRLFLRPSKTIWG

SEQ ID NO: 43897 - protein, 15 aa, BK virus
VWRLFLRPSKTIWGN

SEQ ID NO: 43898 - protein, 15 aa, BK virus
WRLFLRPSKTIWGNP

SEQ ID NO: 43899 - protein, 15 aa, BK virus
RLFLRPSKTIWGNPY

SEQ ID NO: 43900 - protein, 15 aa, BK virus
LFLRPSKTIWGNPYS

SEQ ID NO: 43901 - protein, 15 aa, BK virus
FLRPSKTIWGNPYSF

SEQ ID NO: 43902 - protein, 15 aa, BK virus
LRPSKTIWGNPYSFA

SEQ ID NO: 43903 - protein, 15 aa, BK virus
RPSKTIWGNPYSFAI

SEQ ID NO: 43904 - protein, 15 aa, BK virus
PSKTIWGNPYSFAIF

SEQ ID NO: 43905 - protein, 15 aa, BK virus
SKTIWGNPYSFAIFA

SEQ ID NO: 43906 - protein, 15 aa, BK virus
KTIWGNPYSFAIFAK

SEQ ID NO: 43907 - protein, 16 aa, BK virus
KSCLGKSSLNEKSLFK

SEQ ID NO: 43908 - protein, 16 aa, BK virus
SCLGKSSLNEKSLFKE

SEQ ID NO: 43909 - protein, 16 aa, BK virus
CLGKSSLNEKSLFKEV

SEQ ID NO: 43910 - protein, 16 aa, BK virus
FSSLPRYPVLQGMAYL

SEQ ID NO: 43911 - protein, 16 aa, BK virus
SSLPRYPVLQGMAYLF

SEQ ID NO: 43912 - protein, 16 aa, BK virus
SLPRYPVLQGMAYLFQ

SEQ ID NO: 43913 - protein, 16 aa, BK virus
LPRYPVLQGMAYLFQK

SEQ ID NO: 43914 - protein, 16 aa, BK virus
PRYPVLQGMAYLFQKA

SEQ ID NO: 43915 - protein, 16 aa, BK virus
RYPVLQGMAYLFQKAF

SEQ ID NO: 43916 - protein, 16 aa, BK virus
YPVLQGMAYLFQKAFC

SEQ ID NO: 43917 - protein, 16 aa, BK virus
PVLQGMAYLFQKAFCA

SEQ ID NO: 43918 - protein, 16 aa, BK virus
VLQGMAYLFQKAFCAL

SEQ ID NO: 43919 - protein, 16 aa, BK virus
LQGMAYLFQKAFCALP

SEQ ID NO: 43920 - protein, 16 aa, BK virus
QGMAYLFQKAFCALPL

SEQ ID NO: 43921 - protein, 16 aa, BK virus
GMAYLFQKAFCALPLH

SEQ ID NO: 43922 - protein, 16 aa, BK virus
MAYLFQKAFCALPLHA

SEQ ID NO: 43923 - protein, 16 aa, BK virus
AYLFQKAFCALPLHAM

SEQ ID NO: 43924 - protein, 16 aa, BK virus
YLFQKAFCALPLHAMS

SEQ ID NO: 43925 - protein, 16 aa, BK virus
LFQKAFCALPLHAMSA

SEQ ID NO: 43926 - protein, 16 aa, BK virus
KIFKKRALGLDRLLLH

SEQ ID NO: 43927 - protein, 16 aa, BK virus
RNSAMVGPNNWRNSLQ

SEQ ID NO: 43928 - protein, 16 aa, BK virus
NSAMVGPNNWRNSLQR

SEQ ID NO: 43929 - protein, 16 aa, BK virus
SAMVGPNNWRNSLQRS

SEQ ID NO: 43930 - protein, 16 aa, BK virus
AMVGPNNWRNSLQRSK

SEQ ID NO: 43931 - protein, 16 aa, BK virus
MVGPNNWRNSLQRSKA

SEQ ID NO: 43932 - protein, 16 aa, BK virus
VGPNNWRNSLQRSKAL

SEQ ID NO: 43933 - protein, 16 aa, BK virus
GPNNWRNSLQRSKALR

SEQ ID NO: 43934 - protein, 16 aa, BK virus
VPTYGTEEWESWWSSF

SEQ ID NO: 43935 - protein, 16 aa, BK virus
PTYGTEEWESWWSSFN

SEQ ID NO: 43936 - protein, 16 aa, BK virus
TYGTEEWESWWSSFNE

SEQ ID NO: 43937 - protein, 16 aa, BK virus
YGTEEWESWWSSFNEK

SEQ ID NO: 43938 - protein, 16 aa, BK virus
GTEEWESWWSSFNEKW

SEQ ID NO: 43939 - protein, 16 aa, BK virus
TEEWESWWSSFNEKWD

SEQ ID NO: 43940 - protein, 16 aa, BK virus
EEWESWWSSFNEKWDE

SEQ ID NO: 43941 - protein, 16 aa, BK virus
EWESWWSSFNEKWDED

SEQ ID NO: 43942 - protein, 16 aa, BK virus
WESWWSSFNEKWDEDL

SEQ ID NO: 43943 - protein, 16 aa, BK virus
ESWWSSFNEKWDEDLF

SEQ ID NO: 43944 - protein, 16 aa, BK virus
SWWSSFNEKWDEDLFC

SEQ ID NO: 43945 - protein, 16 aa, BK virus
WWSSFNEKWDEDLFCH

SEQ ID NO: 43946 - protein, 16 aa, BK virus
WSSFNEKWDEDLFCHE

SEQ ID NO: 43947 - protein, 16 aa, BK virus
SSFNEKWDEDLFCHED

SEQ ID NO: 43948 - protein, 16 aa, BK virus
SFNEKWDEDLFCHEDM

SEQ ID NO: 43949 - protein, 16 aa, BK virus
FNEKWDEDLFCHEDMF

SEQ ID NO: 43950 - protein, 16 aa, BK virus
NEKWDEDLFCHEDMFA

SEQ ID NO: 43951 - protein, 16 aa, BK virus
EKWDEDLFCHEDMFAS

SEQ ID NO: 43952 - protein, 16 aa, BK virus
KWDEDLFCHEDMFASD

SEQ ID NO: 43953 - protein, 16 aa, BK virus
WDEDLFCHEDMFASDE

SEQ ID NO: 43954 - protein, 16 aa, BK virus
DEDLFCHEDMFASDEE

SEQ ID NO: 43955 - protein, 16 aa, BK virus
EDLFCHEDMFASDEEA

SEQ ID NO: 43956 - protein, 16 aa, BK virus
DLFCHEDMFASDEEAT

SEQ ID NO: 43957 - protein, 16 aa, BK virus
LFCHEDMFASDEEATA

SEQ ID NO: 43958 - protein, 16 aa, BK virus
FCHEDMFASDEEATAD

SEQ ID NO: 43959 - protein, 16 aa, BK virus
CHEDMFASDEEATADS

SEQ ID NO: 43960 - protein, 16 aa, BK virus
HEDMFASDEEATADSQ

SEQ ID NO: 43961 - protein, 16 aa, BK virus
EDMFASDEEATADSQH

SEQ ID NO: 43962 - protein, 16 aa, BK virus
DMFASDEEATADSQHS

SEQ ID NO: 43963 - protein, 16 aa, BK virus
MFASDEEATADSQHST

SEQ ID NO: 43964 - protein, 16 aa, BK virus
FASDEEATADSQHSTP

SEQ ID NO: 43965 - protein, 16 aa, BK virus
ASDEEATADSQHSTPP

SEQ ID NO: 43966 - protein, 16 aa, BK virus
SDEEATADSQHSTPPK

SEQ ID NO: 43967 - protein, 16 aa, BK virus
DEEATADSQHSTPPKK

SEQ ID NO: 43968 - protein, 16 aa, BK virus
EEATADSQHSTPPKKK

SEQ ID NO: 43969 - protein, 16 aa, BK virus
EATADSQHSTPPKKKR

SEQ ID NO: 43970 - protein, 16 aa, BK virus
ATADSQHSTPPKKKRK

SEQ ID NO: 43971 - protein, 16 aa, BK virus
TADSQHSTPPKKKRKV

SEQ ID NO: 43972 - protein, 16 aa, BK virus
ADSQHSTPPKKKRKVE

SEQ ID NO: 43973 - protein, 16 aa, BK virus
DSQHSTPPKKKRKVED

SEQ ID NO: 43974 - protein, 16 aa, BK virus
SQHSTPPKKKRKVEDP

SEQ ID NO: 43975 - protein, 16 aa, BK virus
QHSTPPKKKRKVEDPK

SEQ ID NO: 43976 - protein, 16 aa, BK virus
HSTPPKKKRKVEDPKD

SEQ ID NO: 43977 - protein, 16 aa, BK virus
STPPKKKRKVEDPKDF

SEQ ID NO: 43978 - protein, 16 aa, BK virus
TPPKKKRKVEDPKDFP

SEQ ID NO: 43979 - protein, 16 aa, BK virus
PPKKKRKVEDPKDFPS

SEQ ID NO: 43980 - protein, 16 aa, BK virus
PKKKRKVEDPKDFPSD

SEQ ID NO: 43981 - protein, 16 aa, BK virus
KKKRKVEDPKDFPSDL

SEQ ID NO: 43982 - protein, 16 aa, BK virus
KKRKVEDPKDFPSDLH

SEQ ID NO: 43983 - protein, 16 aa, BK virus
KRKVEDPKDFPSDLHQ

SEQ ID NO: 43984 - protein, 16 aa, BK virus
RKVEDPKDFPSDLHQF

SEQ ID NO: 43985 - protein, 16 aa, BK virus
KVEDPKDFPSDLHQFL

SEQ ID NO: 43986 - protein, 16 aa, BK virus
VEDPKDFPSDLHQFLS

SEQ ID NO: 43987 - protein, 16 aa, BK virus
EDPKDFPSDLHQFLSQ

SEQ ID NO: 43988 - protein, 16 aa, BK virus
DPKDFPSDLHQFLSQA

SEQ ID NO: 43989 - protein, 16 aa, BK virus
PKDFPSDLHQFLSQAV

SEQ ID NO: 43990 - protein, 16 aa, BK virus
KDFPSDLHQFLSQAVF

SEQ ID NO: 43991 - protein, 16 aa, BK virus
DFPSDLHQFLSQAVFS

SEQ ID NO: 43992 - protein, 16 aa, BK virus
FPSDLHQFLSQAVFSN

SEQ ID NO: 43993 - protein, 16 aa, BK virus
PSDLHQFLSQAVFSNR

SEQ ID NO: 43994 - protein, 16 aa, BK virus
SDLHQFLSQAVFSNRT

SEQ ID NO: 43995 - protein, 16 aa, BK virus
DLHQFLSQAVFSNRTL

SEQ ID NO: 43996 - protein, 16 aa, BK virus
LHQFLSQAVFSNRTLA

SEQ ID NO: 43997 - protein, 16 aa, BK virus
HQFLSQAVFSNRTLAC

SEQ ID NO: 43998 - protein, 16 aa, BK virus
QFLSQAVFSNRTLACF

SEQ ID NO: 43999 - protein, 16 aa, BK virus
FLSQAVFSNRTLACFA

SEQ ID NO: 44000 - protein, 16 aa, BK virus
LSQAVFSNRTLACFAV

SEQ ID NO: 44001 - protein, 16 aa, BK virus
SQAVFSNRTLACFAVY

SEQ ID NO: 44002 - protein, 16 aa, BK virus
QAVFSNRTLACFAVYT

SEQ ID NO: 44003 - protein, 16 aa, BK virus
AVFSNRTLACFAVYTT

SEQ ID NO: 44004 - protein, 16 aa, BK virus
VFSNRTLACFAVYTTK

SEQ ID NO: 44005 - protein, 16 aa, BK virus
FSNRTLACFAVYTTKE

SEQ ID NO: 44006 - protein, 16 aa, BK virus
SNRTLACFAVYTTKEK

SEQ ID NO: 44007 - protein, 16 aa, BK virus
NRTLACFAVYTTKEKA

SEQ ID NO: 44008 - protein, 16 aa, BK virus
RTLACFAVYTTKEKAQ

SEQ ID NO: 44009 - protein, 16 aa, BK virus
TLACFAVYTTKEKAQI

SEQ ID NO: 44010 - protein, 16 aa, BK virus
LACFAVYTTKEKAQIL

SEQ ID NO: 44011 - protein, 16 aa, BK virus
ACFAVYTTKEKAQILY

SEQ ID NO: 44012 - protein, 16 aa, BK virus
CFAVYTTKEKAQILYK

SEQ ID NO: 44013 - protein, 16 aa, BK virus
FAVYTTKEKAQILYKK

SEQ ID NO: 44014 - protein, 16 aa, BK virus
AVYTTKEKAQILYKKL

SEQ ID NO: 44015 - protein, 16 aa, BK virus
VYTTKEKAQILYKKLM

SEQ ID NO: 44016 - protein, 16 aa, BK virus
YTTKEKAQILYKKLME

SEQ ID NO: 44017 - protein, 16 aa, BK virus
TTKEKAQILYKKLMEK

SEQ ID NO: 44018 - protein, 16 aa, BK virus
TKEKAQILYKKLMEKY

SEQ ID NO: 44019 - protein, 16 aa, BK virus
KEKAQILYKKLMEKYS

SEQ ID NO: 44020 - protein, 16 aa, BK virus
EKAQILYKKLMEKYSV

SEQ ID NO: 44021 - protein, 16 aa, BK virus
KAQILYKKLMEKYSVT

SEQ ID NO: 44022 - protein, 16 aa, BK virus
AQILYKKLMEKYSVTF

SEQ ID NO: 44023 - protein, 16 aa, BK virus
QILYKKLMEKYSVTFI

SEQ ID NO: 44024 - protein, 16 aa, BK virus
ILYKKLMEKYSVTFIS

SEQ ID NO: 44025 - protein, 16 aa, BK virus
LYKKLMEKYSVTFISR

SEQ ID NO: 44026 - protein, 16 aa, BK virus
YKKLMEKYSVTFISRH

SEQ ID NO: 44027 - protein, 16 aa, BK virus
KKLMEKYSVTFISRHM

SEQ ID NO: 44028 - protein, 16 aa, BK virus
KLMEKYSVTFISRHMC

SEQ ID NO: 44029 - protein, 16 aa, BK virus
LMEKYSVTFISRHMCA

SEQ ID NO: 44030 - protein, 16 aa, BK virus
MEKYSVTFISRHMCAG

SEQ ID NO: 44031 - protein, 16 aa, BK virus
EKYSVTFISRHMCAGH

SEQ ID NO: 44032 - protein, 16 aa, BK virus
KYSVTFISRHMCAGHN

SEQ ID NO: 44033 - protein, 16 aa, BK virus
YSVTFISRHMCAGHNI

SEQ ID NO: 44034 - protein, 16 aa, BK virus
SVTFISRHMCAGHNII

SEQ ID NO: 44035 - protein, 16 aa, BK virus
VTFISRHMCAGHNIIF

SEQ ID NO: 44036 - protein, 16 aa, BK virus
TFISRHMCAGHNIIFF

SEQ ID NO: 44037 - protein, 16 aa, BK virus
FISRHMCAGHNIIFFL

SEQ ID NO: 44038 - protein, 16 aa, BK virus
ISRHMCAGHNIIFFLT

SEQ ID NO: 44039 - protein, 16 aa, BK virus
SRHMCAGHNIIFFLTP

SEQ ID NO: 44040 - protein, 16 aa, BK virus
RHMCAGHNIIFFLTPH

SEQ ID NO: 44041 - protein, 16 aa, BK virus
HMCAGHNIIFFLTPHR

SEQ ID NO: 44042 - protein, 16 aa, BK virus
MCAGHNIIFFLTPHRH

SEQ ID NO: 44043 - protein, 16 aa, BK virus
CAGHNIIFFLTPHRHR

SEQ ID NO: 44044 - protein, 16 aa, BK virus
AGHNIIFFLTPHRHRV

SEQ ID NO: 44045 - protein, 16 aa, BK virus
GHNIIFFLTPHRHRVS

SEQ ID NO: 44046 - protein, 16 aa, BK virus
HNIIFFLTPHRHRVSA

SEQ ID NO: 44047 - protein, 16 aa, BK virus
NIIFFLTPHRHRVSAI

SEQ ID NO: 44048 - protein, 16 aa, BK virus
IIFFLTPHRHRVSAIN

SEQ ID NO: 44049 - protein, 16 aa, BK virus
IFFLTPHRHRVSAINN

SEQ ID NO: 44050 - protein, 16 aa, BK virus
FFLTPHRHRVSAINNF

SEQ ID NO: 44051 - protein, 16 aa, BK virus
FLTPHRHRVSAINNFC

SEQ ID NO: 44052 - protein, 16 aa, BK virus
LTPHRHRVSAINNFCQ

SEQ ID NO: 44053 - protein, 16 aa, BK virus
TPHRHRVSAINNFCQK

SEQ ID NO: 44054 - protein, 16 aa, BK virus
PHRHRVSAINNFCQKL

SEQ ID NO: 44055 - protein, 16 aa, BK virus
HRHRVSAINNFCQKLC

SEQ ID NO: 44056 - protein, 16 aa, BK virus
RHRVSAINNFCQKLCT

SEQ ID NO: 44057 - protein, 16 aa, BK virus
HRVSAINNFCQKLCTF

SEQ ID NO: 44058 - protein, 16 aa, BK virus
RVSAINNFCQKLCTFS

SEQ ID NO: 44059 - protein, 16 aa, BK virus
VSAINNFCQKLCTFSF

SEQ ID NO: 44060 - protein, 16 aa, BK virus
SAINNFCQKLCTFSFL

SEQ ID NO: 44061 - protein, 16 aa, BK virus
AINNFCQKLCTFSFLI

SEQ ID NO: 44062 - protein, 16 aa, BK virus
INNFCQKLCTFSFLIC

SEQ ID NO: 44063 - protein, 16 aa, BK virus
NNFCQKLCTFSFLICK

SEQ ID NO: 44064 - protein, 16 aa, BK virus
NFCQKLCTFSFLICKG

SEQ ID NO: 44065 - protein, 16 aa, BK virus
FCQKLCTFSFLICKGV

SEQ ID NO: 44066 - protein, 16 aa, BK virus
CQKLCTFSFLICKGVN

SEQ ID NO: 44067 - protein, 16 aa, BK virus
QKLCTFSFLICKGVNK

SEQ ID NO: 44068 - protein, 16 aa, BK virus
KLCTFSFLICKGVNKE

SEQ ID NO: 44069 - protein, 16 aa, BK virus
LCTFSFLICKGVNKEY

SEQ ID NO: 44070 - protein, 16 aa, BK virus
CTFSFLICKGVNKEYL

SEQ ID NO: 44071 - protein, 16 aa, BK virus
TFSFLICKGVNKEYLL

SEQ ID NO: 44072 - protein, 16 aa, BK virus
FSFLICKGVNKEYLLY

SEQ ID NO: 44073 - protein, 16 aa, BK virus
SFLICKGVNKEYLLYS

SEQ ID NO: 44074 - protein, 16 aa, BK virus
FLICKGVNKEYLLYSA

SEQ ID NO: 44075 - protein, 16 aa, BK virus
LICKGVNKEYLLYSAL

SEQ ID NO: 44076 - protein, 16 aa, BK virus
ICKGVNKEYLLYSALT

SEQ ID NO: 44077 - protein, 16 aa, BK virus
CKGVNKEYLLYSALTR

SEQ ID NO: 44078 - protein, 16 aa, BK virus
KGVNKEYLLYSALTRD

SEQ ID NO: 44079 - protein, 16 aa, BK virus
GVNKEYLLYSALTRDP

SEQ ID NO: 44080 - protein, 16 aa, BK virus
VNKEYLLYSALTRDPY

SEQ ID NO: 44081 - protein, 16 aa, BK virus
NKEYLLYSALTRDPYH

SEQ ID NO: 44082 - protein, 16 aa, BK virus
KEYLLYSALTRDPYHT

SEQ ID NO: 44083 - protein, 16 aa, BK virus
EYLLYSALTRDPYHTI

SEQ ID NO: 44084 - protein, 16 aa, BK virus
YLLYSALTRDPYHTIE

SEQ ID NO: 44085 - protein, 16 aa, BK virus
LLYSALTRDPYHTIEE

SEQ ID NO: 44086 - protein, 16 aa, BK virus
LYSALTRDPYHTIEES

SEQ ID NO: 44087 - protein, 16 aa, BK virus
YSALTRDPYHTIEESI

SEQ ID NO: 44088 - protein, 16 aa, BK virus
SALTRDPYHTIEESIQ

SEQ ID NO: 44089 - protein, 16 aa, BK virus
ALTRDPYHTIEESIQG

SEQ ID NO: 44090 - protein, 16 aa, BK virus
LTRDPYHTIEESIQGG

SEQ ID NO: 44091 - protein, 16 aa, BK virus
TRDPYHTIEESIQGGL

SEQ ID NO: 44092 - protein, 16 aa, BK virus
RDPYHTIEESIQGGLK

SEQ ID NO: 44093 - protein, 16 aa, BK virus
DPYHTIEESIQGGLKE

SEQ ID NO: 44094 - protein, 16 aa, BK virus
PYHTIEESIQGGLKEH

SEQ ID NO: 44095 - protein, 16 aa, BK virus
YHTIEESIQGGLKEHD

SEQ ID NO: 44096 - protein, 16 aa, BK virus
HTIEESIQGGLKEHDF

SEQ ID NO: 44097 - protein, 16 aa, BK virus
TIEESIQGGLKEHDFS

SEQ ID NO: 44098 - protein, 16 aa, BK virus
IEESIQGGLKEHDFSP

SEQ ID NO: 44099 - protein, 16 aa, BK virus
EESIQGGLKEHDFSPE

SEQ ID NO: 44100 - protein, 16 aa, BK virus
ESIQGGLKEHDFSPEE

SEQ ID NO: 44101 - protein, 16 aa, BK virus
SIQGGLKEHDFSPEEP

SEQ ID NO: 44102 - protein, 16 aa, BK virus
IQGGLKEHDFSPEEPE

SEQ ID NO: 44103 - protein, 16 aa, BK virus
QGGLKEHDFSPEEPEE

SEQ ID NO: 44104 - protein, 16 aa, BK virus
GGLKEHDFSPEEPEET

SEQ ID NO: 44105 - protein, 16 aa, BK virus
GLKEHDFSPEEPEETK

SEQ ID NO: 44106 - protein, 16 aa, BK virus
LKEHDFSPEEPEETKQ

SEQ ID NO: 44107 - protein, 16 aa, BK virus
KEHDFSPEEPEETKQV

SEQ ID NO: 44108 - protein, 16 aa, BK virus
EHDFSPEEPEETKQVS

SEQ ID NO: 44109 - protein, 16 aa, BK virus
HDFSPEEPEETKQVSW

SEQ ID NO: 44110 - protein, 16 aa, BK virus
DFSPEEPEETKQVSWK

SEQ ID NO: 44111 - protein, 16 aa, BK virus
FSPEEPEETKQVSWKL

SEQ ID NO: 44112 - protein, 16 aa, BK virus
SPEEPEETKQVSWKLI

SEQ ID NO: 44113 - protein, 16 aa, BK virus
PEEPEETKQVSWKLIT

SEQ ID NO: 44114 - protein, 16 aa, BK virus
EEPEETKQVSWKLITE

SEQ ID NO: 44115 - protein, 16 aa, BK virus
EPEETKQVSWKLITEY

SEQ ID NO: 44116 - protein, 16 aa, BK virus
PEETKQVSWKLITEYA

SEQ ID NO: 44117 - protein, 16 aa, BK virus
EETKQVSWKLITEYAV

SEQ ID NO: 44118 - protein, 16 aa, BK virus
ETKQVSWKLITEYAVE

SEQ ID NO: 44119 - protein, 16 aa, BK virus
TKQVSWKLITEYAVET

SEQ ID NO: 44120 - protein, 16 aa, BK virus
KQVSWKLITEYAVETK

SEQ ID NO: 44121 - protein, 16 aa, BK virus
QVSWKLITEYAVETKC

SEQ ID NO: 44122 - protein, 16 aa, BK virus
VSWKLITEYAVETKCE

SEQ ID NO: 44123 - protein, 16 aa, BK virus
SWKLITEYAVETKCED

SEQ ID NO: 44124 - protein, 16 aa, BK virus
WKLITEYAVETKCEDV

SEQ ID NO: 44125 - protein, 16 aa, BK virus
KLITEYAVETKCEDVF

SEQ ID NO: 44126 - protein, 16 aa, BK virus
LITEYAVETKCEDVFL

SEQ ID NO: 44127 - protein, 16 aa, BK virus
ITEYAVETKCEDVFLL

SEQ ID NO: 44128 - protein, 16 aa, BK virus
TEYAVETKCEDVFLLL

SEQ ID NO: 44129 - protein, 16 aa, BK virus
EYAVETKCEDVFLLLG

SEQ ID NO: 44130 - protein, 16 aa, BK virus
YAVETKCEDVFLLLGM

SEQ ID NO: 44131 - protein, 16 aa, BK virus
AVETKCEDVFLLLGMY

SEQ ID NO: 44132 - protein, 16 aa, BK virus
VETKCEDVFLLLGMYL

SEQ ID NO: 44133 - protein, 16 aa, BK virus
ETKCEDVFLLLGMYLE

SEQ ID NO: 44134 - protein, 16 aa, BK virus
TKCEDVFLLLGMYLEF

SEQ ID NO: 44135 - protein, 16 aa, BK virus
KCEDVFLLLGMYLEFQ

SEQ ID NO: 44136 - protein, 16 aa, BK virus
CEDVFLLLGMYLEFQY

SEQ ID NO: 44137 - protein, 16 aa, BK virus
EDVFLLLGMYLEFQYN

SEQ ID NO: 44138 - protein, 16 aa, BK virus
DVFLLLGMYLEFQYNV

SEQ ID NO: 44139 - protein, 16 aa, BK virus
VFLLLGMYLEFQYNVE

SEQ ID NO: 44140 - protein, 16 aa, BK virus
FLLLGMYLEFQYNVEE

SEQ ID NO: 44141 - protein, 16 aa, BK virus
LLLGMYLEFQYNVEEC

SEQ ID NO: 44142 - protein, 16 aa, BK virus
LLGMYLEFQYNVEECK

SEQ ID NO: 44143 - protein, 16 aa, BK virus
LGMYLEFQYNVEECKK

SEQ ID NO: 44144 - protein, 16 aa, BK virus
GMYLEFQYNVEECKKC

SEQ ID NO: 44145 - protein, 16 aa, BK virus
MYLEFQYNVEECKKCQ

SEQ ID NO: 44146 - protein, 16 aa, BK virus
YLEFQYNVEECKKCQK

SEQ ID NO: 44147 - protein, 16 aa, BK virus
LEFQYNVEECKKCQKK

SEQ ID NO: 44148 - protein, 16 aa, BK virus
EFQYNVEECKKCQKKD

SEQ ID NO: 44149 - protein, 16 aa, BK virus
FQYNVEECKKCQKKDQ

SEQ ID NO: 44150 - protein, 16 aa, BK virus
QYNVEECKKCQKKDQP

SEQ ID NO: 44151 - protein, 16 aa, BK virus
YNVEECKKCQKKDQPY

SEQ ID NO: 44152 - protein, 16 aa, BK virus
NVEECKKCQKKDQPYH

SEQ ID NO: 44153 - protein, 16 aa, BK virus
VEECKKCQKKDQPYHF

SEQ ID NO: 44154 - protein, 16 aa, BK virus
EECKKCQKKDQPYHFK

SEQ ID NO: 44155 - protein, 16 aa, BK virus
ECKKCQKKDQPYHFKY

SEQ ID NO: 44156 - protein, 16 aa, BK virus
CKKCQKKDQPYHFKYH

SEQ ID NO: 44157 - protein, 16 aa, BK virus
KKCQKKDQPYHFKYHE

SEQ ID NO: 44158 - protein, 16 aa, BK virus
KCQKKDQPYHFKYHEK

SEQ ID NO: 44159 - protein, 16 aa, BK virus
CQKKDQPYHFKYHEKH

SEQ ID NO: 44160 - protein, 16 aa, BK virus
QKKDQPYHFKYHEKHF

SEQ ID NO: 44161 - protein, 16 aa, BK virus
KKDQPYHFKYHEKHFA

SEQ ID NO: 44162 - protein, 16 aa, BK virus
KDQPYHFKYHEKHFAN

SEQ ID NO: 44163 - protein, 16 aa, BK virus
DQPYHFKYHEKHFANA

SEQ ID NO: 44164 - protein, 16 aa, BK virus
QPYHFKYHEKHFANAI

SEQ ID NO: 44165 - protein, 16 aa, BK virus
PYHFKYHEKHFANAII

SEQ ID NO: 44166 - protein, 16 aa, BK virus
YHFKYHEKHFANAIIF

SEQ ID NO: 44167 - protein, 16 aa, BK virus
HFKYHEKHFANAIIFA

SEQ ID NO: 44168 - protein, 16 aa, BK virus
FKYHEKHFANAIIFAE

SEQ ID NO: 44169 - protein, 16 aa, BK virus
KYHEKHFANAIIFAES

SEQ ID NO: 44170 - protein, 16 aa, BK virus
YHEKHFANAIIFAESK

SEQ ID NO: 44171 - protein, 16 aa, BK virus
HEKHFANAIIFAESKN

SEQ ID NO: 44172 - protein, 16 aa, BK virus
EKHFANAIIFAESKNQ

SEQ ID NO: 44173 - protein, 16 aa, BK virus
KHFANAIIFAESKNQK

SEQ ID NO: 44174 - protein, 16 aa, BK virus
HFANAIIFAESKNQKS

SEQ ID NO: 44175 - protein, 16 aa, BK virus
FANAIIFAESKNQKSI

SEQ ID NO: 44176 - protein, 16 aa, BK virus
ANAIIFAESKNQKSIC

SEQ ID NO: 44177 - protein, 16 aa, BK virus
NAIIFAESKNQKSICQ

SEQ ID NO: 44178 - protein, 16 aa, BK virus
AIIFAESKNQKSICQQ

SEQ ID NO: 44179 - protein, 16 aa, BK virus
IIFAESKNQKSICQQA

SEQ ID NO: 44180 - protein, 16 aa, BK virus
IFAESKNQKSICQQAV

SEQ ID NO: 44181 - protein, 16 aa, BK virus
FAESKNQKSICQQAVD

SEQ ID NO: 44182 - protein, 16 aa, BK virus
AESKNQKSICQQAVDT

SEQ ID NO: 44183 - protein, 16 aa, BK virus
ESKNQKSICQQAVDTV

SEQ ID NO: 44184 - protein, 16 aa, BK virus
SKNQKSICQQAVDTVL

SEQ ID NO: 44185 - protein, 16 aa, BK virus
KNQKSICQQAVDTVLA

SEQ ID NO: 44186 - protein, 16 aa, BK virus
NQKSICQQAVDTVLAK

SEQ ID NO: 44187 - protein, 16 aa, BK virus
QKSICQQAVDTVLAKK

SEQ ID NO: 44188 - protein, 16 aa, BK virus
KSICQQAVDTVLAKKR

SEQ ID NO: 44189 - protein, 16 aa, BK virus
SICQQAVDTVLAKKRV

SEQ ID NO: 44190 - protein, 16 aa, BK virus
ICQQAVDTVLAKKRVD

SEQ ID NO: 44191 - protein, 16 aa, BK virus
CQQAVDTVLAKKRVDT

SEQ ID NO: 44192 - protein, 16 aa, BK virus
QQAVDTVLAKKRVDTL

SEQ ID NO: 44193 - protein, 16 aa, BK virus
QAVDTVLAKKRVDTLH

SEQ ID NO: 44194 - protein, 16 aa, BK virus
AVDTVLAKKRVDTLHM

SEQ ID NO: 44195 - protein, 16 aa, BK virus
VDTVLAKKRVDTLHMT

SEQ ID NO: 44196 - protein, 16 aa, BK virus
DTVLAKKRVDTLHMTR

SEQ ID NO: 44197 - protein, 16 aa, BK virus
TVLAKKRVDTLHMTRE

SEQ ID NO: 44198 - protein, 16 aa, BK virus
VLAKKRVDTLHMTREE

SEQ ID NO: 44199 - protein, 16 aa, BK virus
LAKKRVDTLHMTREEM

SEQ ID NO: 44200 - protein, 16 aa, BK virus
AKKRVDTLHMTREEML

SEQ ID NO: 44201 - protein, 16 aa, BK virus
KKRVDTLHMTREEMLT

SEQ ID NO: 44202 - protein, 16 aa, BK virus
KRVDTLHMTREEMLTE

SEQ ID NO: 44203 - protein, 16 aa, BK virus
RVDTLHMTREEMLTER

SEQ ID NO: 44204 - protein, 16 aa, BK virus
VDTLHMTREEMLTERF

SEQ ID NO: 44205 - protein, 16 aa, BK virus
DTLHMTREEMLTERFN

SEQ ID NO: 44206 - protein, 16 aa, BK virus
TLHMTREEMLTERFNH

SEQ ID NO: 44207 - protein, 16 aa, BK virus
LHMTREEMLTERFNHI

SEQ ID NO: 44208 - protein, 16 aa, BK virus
HMTREEMLTERFNHIL

SEQ ID NO: 44209 - protein, 16 aa, BK virus
MTREEMLTERFNHILD

SEQ ID NO: 44210 - protein, 16 aa, BK virus
TREEMLTERFNHILDK

SEQ ID NO: 44211 - protein, 16 aa, BK virus
REEMLTERFNHILDKM

SEQ ID NO: 44212 - protein, 16 aa, BK virus
EEMLTERFNHILDKMD

SEQ ID NO: 44213 - protein, 16 aa, BK virus
EMLTERFNHILDKMDL

SEQ ID NO: 44214 - protein, 16 aa, BK virus
MLTERFNHILDKMDLI

SEQ ID NO: 44215 - protein, 16 aa, BK virus
LTERFNHILDKMDLIF

SEQ ID NO: 44216 - protein, 16 aa, BK virus
TERFNHILDKMDLIFG

SEQ ID NO: 44217 - protein, 16 aa, BK virus
ERFNHILDKMDLIFGA

SEQ ID NO: 44218 - protein, 16 aa, BK virus
RFNHILDKMDLIFGAH

SEQ ID NO: 44219 - protein, 16 aa, BK virus
FNHILDKMDLIFGAHG

SEQ ID NO: 44220 - protein, 16 aa, BK virus
NHILDKMDLIFGAHGN

SEQ ID NO: 44221 - protein, 16 aa, BK virus
HILDKMDLIFGAHGNA

SEQ ID NO: 44222 - protein, 16 aa, BK virus
ILDKMDLIFGAHGNAV

SEQ ID NO: 44223 - protein, 16 aa, BK virus
LDKMDLIFGAHGNAVL

SEQ ID NO: 44224 - protein, 16 aa, BK virus
DKMDLIFGAHGNAVLE

SEQ ID NO: 44225 - protein, 16 aa, BK virus
KMDLIFGAHGNAVLEQ

SEQ ID NO: 44226 - protein, 16 aa, BK virus
MDLIFGAHGNAVLEQY

SEQ ID NO: 44227 - protein, 16 aa, BK virus
DLIFGAHGNAVLEQYM

SEQ ID NO: 44228 - protein, 16 aa, BK virus
LIFGAHGNAVLEQYMA

SEQ ID NO: 44229 - protein, 16 aa, BK virus
IFGAHGNAVLEQYMAG

SEQ ID NO: 44230 - protein, 16 aa, BK virus
FGAHGNAVLEQYMAGV

SEQ ID NO: 44231 - protein, 16 aa, BK virus
GAHGNAVLEQYMAGVA

SEQ ID NO: 44232 - protein, 16 aa, BK virus
AHGNAVLEQYMAGVAW

SEQ ID NO: 44233 - protein, 16 aa, BK virus
HGNAVLEQYMAGVAWL

SEQ ID NO: 44234 - protein, 16 aa, BK virus
GNAVLEQYMAGVAWLH

SEQ ID NO: 44235 - protein, 16 aa, BK virus
NAVLEQYMAGVAWLHC

SEQ ID NO: 44236 - protein, 16 aa, BK virus
AVLEQYMAGVAWLHCL

SEQ ID NO: 44237 - protein, 16 aa, BK virus
VLEQYMAGVAWLHCLL

SEQ ID NO: 44238 - protein, 16 aa, BK virus
LEQYMAGVAWLHCLLP

SEQ ID NO: 44239 - protein, 16 aa, BK virus
EQYMAGVAWLHCLLPK

SEQ ID NO: 44240 - protein, 16 aa, BK virus
QYMAGVAWLHCLLPKM

SEQ ID NO: 44241 - protein, 16 aa, BK virus
YMAGVAWLHCLLPKMD

SEQ ID NO: 44242 - protein, 16 aa, BK virus
MAGVAWLHCLLPKMDS

SEQ ID NO: 44243 - protein, 16 aa, BK virus
AGVAWLHCLLPKMDSV

SEQ ID NO: 44244 - protein, 16 aa, BK virus
GVAWLHCLLPKMDSVI

SEQ ID NO: 44245 - protein, 16 aa, BK virus
VAWLHCLLPKMDSVIF

SEQ ID NO: 44246 - protein, 16 aa, BK virus
AWLHCLLPKMDSVIFD

SEQ ID NO: 44247 - protein, 16 aa, BK virus
WLHCLLPKMDSVIFDF

SEQ ID NO: 44248 - protein, 16 aa, BK virus
LHCLLPKMDSVIFDFL

SEQ ID NO: 44249 - protein, 16 aa, BK virus
HCLLPKMDSVIFDFLH

SEQ ID NO: 44250 - protein, 16 aa, BK virus
CLLPKMDSVIFDFLHC

SEQ ID NO: 44251 - protein, 16 aa, BK virus
LLPKMDSVIFDFLHCI

SEQ ID NO: 44252 - protein, 16 aa, BK virus
LPKMDSVIFDFLHCIV

SEQ ID NO: 44253 - protein, 16 aa, BK virus
PKMDSVIFDFLHCIVF

SEQ ID NO: 44254 - protein, 16 aa, BK virus
KMDSVIFDFLHCIVFN

SEQ ID NO: 44255 - protein, 16 aa, BK virus
MDSVIFDFLHCIVFNV

SEQ ID NO: 44256 - protein, 16 aa, BK virus
DSVIFDFLHCIVFNVP

SEQ ID NO: 44257 - protein, 16 aa, BK virus
SVIFDFLHCIVFNVPK

SEQ ID NO: 44258 - protein, 16 aa, BK virus
VIFDFLHCIVFNVPKR

SEQ ID NO: 44259 - protein, 16 aa, BK virus
IFDFLHCIVFNVPKRR

SEQ ID NO: 44260 - protein, 16 aa, BK virus
FDFLHCIVFNVPKRRY

SEQ ID NO: 44261 - protein, 16 aa, BK virus
DFLHCIVFNVPKRRYW

SEQ ID NO: 44262 - protein, 16 aa, BK virus
FLHCIVFNVPKRRYWL

SEQ ID NO: 44263 - protein, 16 aa, BK virus
LHCIVFNVPKRRYWLF

SEQ ID NO: 44264 - protein, 16 aa, BK virus
HCIVFNVPKRRYWLFK

SEQ ID NO: 44265 - protein, 16 aa, BK virus
CIVFNVPKRRYWLFKG

SEQ ID NO: 44266 - protein, 16 aa, BK virus
IVFNVPKRRYWLFKGP

SEQ ID NO: 44267 - protein, 16 aa, BK virus
VFNVPKRRYWLFKGPI

SEQ ID NO: 44268 - protein, 16 aa, BK virus
FNVPKRRYWLFKGPID

SEQ ID NO: 44269 - protein, 16 aa, BK virus
NVPKRRYWLFKGPIDS

SEQ ID NO: 44270 - protein, 16 aa, BK virus
VPKRRYWLFKGPIDSG

SEQ ID NO: 44271 - protein, 16 aa, BK virus
PKRRYWLFKGPIDSGK

SEQ ID NO: 44272 - protein, 16 aa, BK virus
KRRYWLFKGPIDSGKT

SEQ ID NO: 44273 - protein, 16 aa, BK virus
RRYWLFKGPIDSGKTT

SEQ ID NO: 44274 - protein, 16 aa, BK virus
RYWLFKGPIDSGKTTL

SEQ ID NO: 44275 - protein, 16 aa, BK virus
YWLFKGPIDSGKTTLA

SEQ ID NO: 44276 - protein, 16 aa, BK virus
WLFKGPIDSGKTTLAA

SEQ ID NO: 44277 - protein, 16 aa, BK virus
LFKGPIDSGKTTLAAG

SEQ ID NO: 44278 - protein, 16 aa, BK virus
FKGPIDSGKTTLAAGL

SEQ ID NO: 44279 - protein, 16 aa, BK virus
KGPIDSGKTTLAAGLL

SEQ ID NO: 44280 - protein, 16 aa, BK virus
GPIDSGKTTLAAGLLD

SEQ ID NO: 44281 - protein, 16 aa, BK virus
PIDSGKTTLAAGLLDL

SEQ ID NO: 44282 - protein, 16 aa, BK virus
IDSGKTTLAAGLLDLC

SEQ ID NO: 44283 - protein, 16 aa, BK virus
DSGKTTLAAGLLDLCG

SEQ ID NO: 44284 - protein, 16 aa, BK virus
SGKTTLAAGLLDLCGG

SEQ ID NO: 44285 - protein, 16 aa, BK virus
GKTTLAAGLLDLCGGK

SEQ ID NO: 44286 - protein, 16 aa, BK virus
KTTLAAGLLDLCGGKA

SEQ ID NO: 44287 - protein, 16 aa, BK virus
TTLAAGLLDLCGGKAL

SEQ ID NO: 44288 - protein, 16 aa, BK virus
TLAAGLLDLCGGKALN

SEQ ID NO: 44289 - protein, 16 aa, BK virus
LAAGLLDLCGGKALNV

SEQ ID NO: 44290 - protein, 16 aa, BK virus
AAGLLDLCGGKALNVN

SEQ ID NO: 44291 - protein, 16 aa, BK virus
AGLLDLCGGKALNVNL

SEQ ID NO: 44292 - protein, 16 aa, BK virus
GLLDLCGGKALNVNLP

SEQ ID NO: 44293 - protein, 16 aa, BK virus
LLDLCGGKALNVNLPM

SEQ ID NO: 44294 - protein, 16 aa, BK virus
LDLCGGKALNVNLPME

SEQ ID NO: 44295 - protein, 16 aa, BK virus
DLCGGKALNVNLPMER

SEQ ID NO: 44296 - protein, 16 aa, BK virus
LCGGKALNVNLPMERL

SEQ ID NO: 44297 - protein, 16 aa, BK virus
CGGKALNVNLPMERLT

SEQ ID NO: 44298 - protein, 16 aa, BK virus
GGKALNVNLPMERLTF

SEQ ID NO: 44299 - protein, 16 aa, BK virus
GKALNVNLPMERLTFE

SEQ ID NO: 44300 - protein, 16 aa, BK virus
KALNVNLPMERLTFEL

SEQ ID NO: 44301 - protein, 16 aa, BK virus
ALNVNLPMERLTFELG

SEQ ID NO: 44302 - protein, 16 aa, BK virus
LNVNLPMERLTFELGV

SEQ ID NO: 44303 - protein, 16 aa, BK virus
NVNLPMERLTFELGVA

SEQ ID NO: 44304 - protein, 16 aa, BK virus
VNLPMERLTFELGVAI

SEQ ID NO: 44305 - protein, 16 aa, BK virus
NLPMERLTFELGVAID

SEQ ID NO: 44306 - protein, 16 aa, BK virus
LPMERLTFELGVAIDQ

SEQ ID NO: 44307 - protein, 16 aa, BK virus
PMERLTFELGVAIDQY

SEQ ID NO: 44308 - protein, 16 aa, BK virus
MERLTFELGVAIDQYM

SEQ ID NO: 44309 - protein, 16 aa, BK virus
ERLTFELGVAIDQYMV

SEQ ID NO: 44310 - protein, 16 aa, BK virus
RLTFELGVAIDQYMVV

SEQ ID NO: 44311 - protein, 16 aa, BK virus
LTFELGVAIDQYMVVF

SEQ ID NO: 44312 - protein, 16 aa, BK virus
TFELGVAIDQYMVVFE

SEQ ID NO: 44313 - protein, 16 aa, BK virus
FELGVAIDQYMVVFED

SEQ ID NO: 44314 - protein, 16 aa, BK virus
ELGVAIDQYMVVFEDV

SEQ ID NO: 44315 - protein, 16 aa, BK virus
LGVAIDQYMVVFEDVK

SEQ ID NO: 44316 - protein, 16 aa, BK virus
GVAIDQYMVVFEDVKG

SEQ ID NO: 44317 - protein, 16 aa, BK virus
VAIDQYMVVFEDVKGT

SEQ ID NO: 44318 - protein, 16 aa, BK virus
AIDQYMVVFEDVKGTG

SEQ ID NO: 44319 - protein, 16 aa, BK virus
IDQYMVVFEDVKGTGA

SEQ ID NO: 44320 - protein, 16 aa, BK virus
DQYMVVFEDVKGTGAE

SEQ ID NO: 44321 - protein, 16 aa, BK virus
QYMVVFEDVKGTGAES

SEQ ID NO: 44322 - protein, 16 aa, BK virus
YMVVFEDVKGTGAESK

SEQ ID NO: 44323 - protein, 16 aa, BK virus
MVVFEDVKGTGAESKD

SEQ ID NO: 44324 - protein, 16 aa, BK virus
VVFEDVKGTGAESKDL

SEQ ID NO: 44325 - protein, 16 aa, BK virus
VFEDVKGTGAESKDLP

SEQ ID NO: 44326 - protein, 16 aa, BK virus
FEDVKGTGAESKDLPS

SEQ ID NO: 44327 - protein, 16 aa, BK virus
EDVKGTGAESKDLPSG

SEQ ID NO: 44328 - protein, 16 aa, BK virus
DVKGTGAESKDLPSGH

SEQ ID NO: 44329 - protein, 16 aa, BK virus
VKGTGAESKDLPSGHG

SEQ ID NO: 44330 - protein, 16 aa, BK virus
KGTGAESKDLPSGHGI

SEQ ID NO: 44331 - protein, 16 aa, BK virus
GTGAESKDLPSGHGIN

SEQ ID NO: 44332 - protein, 16 aa, BK virus
TGAESKDLPSGHGINN

SEQ ID NO: 44333 - protein, 16 aa, BK virus
GAESKDLPSGHGINNL

SEQ ID NO: 44334 - protein, 16 aa, BK virus
AESKDLPSGHGINNLD

SEQ ID NO: 44335 - protein, 16 aa, BK virus
ESKDLPSGHGINNLDS

SEQ ID NO: 44336 - protein, 16 aa, BK virus
SKDLPSGHGINNLDSL

SEQ ID NO: 44337 - protein, 16 aa, BK virus
KDLPSGHGINNLDSLR

SEQ ID NO: 44338 - protein, 16 aa, BK virus
DLPSGHGINNLDSLRD

SEQ ID NO: 44339 - protein, 16 aa, BK virus
LPSGHGINNLDSLRDY

SEQ ID NO: 44340 - protein, 16 aa, BK virus
PSGHGINNLDSLRDYL

SEQ ID NO: 44341 - protein, 16 aa, BK virus
SGHGINNLDSLRDYLD

SEQ ID NO: 44342 - protein, 16 aa, BK virus
GHGINNLDSLRDYLDG

SEQ ID NO: 44343 - protein, 16 aa, BK virus
HGINNLDSLRDYLDGS

SEQ ID NO: 44344 - protein, 16 aa, BK virus
GINNLDSLRDYLDGSV

SEQ ID NO: 44345 - protein, 16 aa, BK virus
INNLDSLRDYLDGSVK

SEQ ID NO: 44346 - protein, 16 aa, BK virus
NNLDSLRDYLDGSVKV

SEQ ID NO: 44347 - protein, 16 aa, BK virus
NLDSLRDYLDGSVKVN

SEQ ID NO: 44348 - protein, 16 aa, BK virus
LDSLRDYLDGSVKVNL

SEQ ID NO: 44349 - protein, 16 aa, BK virus
DSLRDYLDGSVKVNLE

SEQ ID NO: 44350 - protein, 16 aa, BK virus
SLRDYLDGSVKVNLEK

SEQ ID NO: 44351 - protein, 16 aa, BK virus
LRDYLDGSVKVNLEKK

SEQ ID NO: 44352 - protein, 16 aa, BK virus
RDYLDGSVKVNLEKKH

SEQ ID NO: 44353 - protein, 16 aa, BK virus
DYLDGSVKVNLEKKHL

SEQ ID NO: 44354 - protein, 16 aa, BK virus
YLDGSVKVNLEKKHLN

SEQ ID NO: 44355 - protein, 16 aa, BK virus
LDGSVKVNLEKKHLNK

SEQ ID NO: 44356 - protein, 16 aa, BK virus
DGSVKVNLEKKHLNKR

SEQ ID NO: 44357 - protein, 16 aa, BK virus
GSVKVNLEKKHLNKRT

SEQ ID NO: 44358 - protein, 16 aa, BK virus
SVKVNLEKKHLNKRTQ

SEQ ID NO: 44359 - protein, 16 aa, BK virus
VKVNLEKKHLNKRTQI

SEQ ID NO: 44360 - protein, 16 aa, BK virus
KVNLEKKHLNKRTQIF

SEQ ID NO: 44361 - protein, 16 aa, BK virus
VNLEKKHLNKRTQIFP

SEQ ID NO: 44362 - protein, 16 aa, BK virus
NLEKKHLNKRTQIFPP

SEQ ID NO: 44363 - protein, 16 aa, BK virus
LEKKHLNKRTQIFPPG

SEQ ID NO: 44364 - protein, 16 aa, BK virus
EKKHLNKRTQIFPPGL

SEQ ID NO: 44365 - protein, 16 aa, BK virus
KKHLNKRTQIFPPGLV

SEQ ID NO: 44366 - protein, 16 aa, BK virus
KHLNKRTQIFPPGLVT

SEQ ID NO: 44367 - protein, 16 aa, BK virus
HLNKRTQIFPPGLVTM

SEQ ID NO: 44368 - protein, 16 aa, BK virus
LNKRTQIFPPGLVTMN

SEQ ID NO: 44369 - protein, 16 aa, BK virus
NKRTQIFPPGLVTMNE

SEQ ID NO: 44370 - protein, 16 aa, BK virus
KRTQIFPPGLVTMNEY

SEQ ID NO: 44371 - protein, 16 aa, BK virus
RTQIFPPGLVTMNEYP

SEQ ID NO: 44372 - protein, 16 aa, BK virus
TQIFPPGLVTMNEYPV

SEQ ID NO: 44373 - protein, 16 aa, BK virus
QIFPPGLVTMNEYPVP

SEQ ID NO: 44374 - protein, 16 aa, BK virus
IFPPGLVTMNEYPVPK

SEQ ID NO: 44375 - protein, 16 aa, BK virus
FPPGLVTMNEYPVPKT

SEQ ID NO: 44376 - protein, 16 aa, BK virus
PPGLVTMNEYPVPKTL

SEQ ID NO: 44377 - protein, 16 aa, BK virus
PGLVTMNEYPVPKTLQ

SEQ ID NO: 44378 - protein, 16 aa, BK virus
GLVTMNEYPVPKTLQA

SEQ ID NO: 44379 - protein, 16 aa, BK virus
LVTMNEYPVPKTLQAR

SEQ ID NO: 44380 - protein, 16 aa, BK virus
VTMNEYPVPKTLQARF

SEQ ID NO: 44381 - protein, 16 aa, BK virus
TMNEYPVPKTLQARFV

SEQ ID NO: 44382 - protein, 16 aa, BK virus
MNEYPVPKTLQARFVR

SEQ ID NO: 44383 - protein, 16 aa, BK virus
NEYPVPKTLQARFVRQ

SEQ ID NO: 44384 - protein, 16 aa, BK virus
EYPVPKTLQARFVRQI

SEQ ID NO: 44385 - protein, 16 aa, BK virus
YPVPKTLQARFVRQID

SEQ ID NO: 44386 - protein, 16 aa, BK virus
PVPKTLQARFVRQIDF

SEQ ID NO: 44387 - protein, 16 aa, BK virus
VPKTLQARFVRQIDFR

SEQ ID NO: 44388 - protein, 16 aa, BK virus
PKTLQARFVRQIDFRP

SEQ ID NO: 44389 - protein, 16 aa, BK virus
KTLQARFVRQIDFRPK

SEQ ID NO: 44390 - protein, 16 aa, BK virus
TLQARFVRQIDFRPKI

SEQ ID NO: 44391 - protein, 16 aa, BK virus
LQARFVRQIDFRPKIY

SEQ ID NO: 44392 - protein, 16 aa, BK virus
QARFVRQIDFRPKIYL

SEQ ID NO: 44393 - protein, 16 aa, BK virus
ARFVRQIDFRPKIYLR

SEQ ID NO: 44394 - protein, 16 aa, BK virus
RFVRQIDFRPKIYLRK

SEQ ID NO: 44395 - protein, 16 aa, BK virus
FVRQIDFRPKIYLRKS

SEQ ID NO: 44396 - protein, 16 aa, BK virus
VRQIDFRPKIYLRKSL

SEQ ID NO: 44397 - protein, 16 aa, BK virus
RQIDFRPKIYLRKSLQ

SEQ ID NO: 44398 - protein, 16 aa, BK virus
QIDFRPKIYLRKSLQN

SEQ ID NO: 44399 - protein, 16 aa, BK virus
IDFRPKIYLRKSLQNS

SEQ ID NO: 44400 - protein, 16 aa, BK virus
DFRPKIYLRKSLQNSE

SEQ ID NO: 44401 - protein, 16 aa, BK virus
FRPKIYLRKSLQNSEF

SEQ ID NO: 44402 - protein, 16 aa, BK virus
RPKIYLRKSLQNSEFL

SEQ ID NO: 44403 - protein, 16 aa, BK virus
PKIYLRKSLQNSEFLL

SEQ ID NO: 44404 - protein, 16 aa, BK virus
KIYLRKSLQNSEFLLE

SEQ ID NO: 44405 - protein, 16 aa, BK virus
IYLRKSLQNSEFLLEK

SEQ ID NO: 44406 - protein, 16 aa, BK virus
YLRKSLQNSEFLLEKR

SEQ ID NO: 44407 - protein, 16 aa, BK virus
LRKSLQNSEFLLEKRI

SEQ ID NO: 44408 - protein, 16 aa, BK virus
RKSLQNSEFLLEKRIL

SEQ ID NO: 44409 - protein, 16 aa, BK virus
KSLQNSEFLLEKRILQ

SEQ ID NO: 44410 - protein, 16 aa, BK virus
SLQNSEFLLEKRILQS

SEQ ID NO: 44411 - protein, 16 aa, BK virus
LQNSEFLLEKRILQSG

SEQ ID NO: 44412 - protein, 16 aa, BK virus
QNSEFLLEKRILQSGM

SEQ ID NO: 44413 - protein, 16 aa, BK virus
NSEFLLEKRILQSGMT

SEQ ID NO: 44414 - protein, 16 aa, BK virus
SEFLLEKRILQSGMTL

SEQ ID NO: 44415 - protein, 16 aa, BK virus
EFLLEKRILQSGMTLL

SEQ ID NO: 44416 - protein, 16 aa, BK virus
FLLEKRILQSGMTLLL

SEQ ID NO: 44417 - protein, 16 aa, BK virus
LLEKRILQSGMTLLLL

SEQ ID NO: 44418 - protein, 16 aa, BK virus
LEKRILQSGMTLLLLL

SEQ ID NO: 44419 - protein, 16 aa, BK virus
EKRILQSGMTLLLLLI

SEQ ID NO: 44420 - protein, 16 aa, BK virus
KRILQSGMTLLLLLIW

SEQ ID NO: 44421 - protein, 16 aa, BK virus
RILQSGMTLLLLLIWF

SEQ ID NO: 44422 - protein, 16 aa, BK virus
ILQSGMTLLLLLIWFR

SEQ ID NO: 44423 - protein, 16 aa, BK virus
LQSGMTLLLLLIWFRP

SEQ ID NO: 44424 - protein, 16 aa, BK virus
QSGMTLLLLLIWFRPV

SEQ ID NO: 44425 - protein, 16 aa, BK virus
SGMTLLLLLIWFRPVA

SEQ ID NO: 44426 - protein, 16 aa, BK virus
GMTLLLLLIWFRPVAD

SEQ ID NO: 44427 - protein, 16 aa, BK virus
MTLLLLLIWFRPVADF

SEQ ID NO: 44428 - protein, 16 aa, BK virus
TLLLLLIWFRPVADFA

SEQ ID NO: 44429 - protein, 16 aa, BK virus
LLLLLIWFRPVADFAT

SEQ ID NO: 44430 - protein, 16 aa, BK virus
LLLLIWFRPVADFATD

SEQ ID NO: 44431 - protein, 16 aa, BK virus
LLLIWFRPVADFATDI

SEQ ID NO: 44432 - protein, 16 aa, BK virus
LLIWFRPVADFATDIQ

SEQ ID NO: 44433 - protein, 16 aa, BK virus
LIWFRPVADFATDIQS

SEQ ID NO: 44434 - protein, 16 aa, BK virus
IWFRPVADFATDIQSR

SEQ ID NO: 44435 - protein, 16 aa, BK virus
WFRPVADFATDIQSRI

SEQ ID NO: 44436 - protein, 16 aa, BK virus
FRPVADFATDIQSRIV

SEQ ID NO: 44437 - protein, 16 aa, BK virus
RPVADFATDIQSRIVE

SEQ ID NO: 44438 - protein, 16 aa, BK virus
PVADFATDIQSRIVEW

SEQ ID NO: 44439 - protein, 16 aa, BK virus
VADFATDIQSRIVEWK

SEQ ID NO: 44440 - protein, 16 aa, BK virus
ADFATDIQSRIVEWKE

SEQ ID NO: 44441 - protein, 16 aa, BK virus
DFATDIQSRIVEWKER

SEQ ID NO: 44442 - protein, 16 aa, BK virus
FATDIQSRIVEWKERL

SEQ ID NO: 44443 - protein, 16 aa, BK virus
ATDIQSRIVEWKERLD

SEQ ID NO: 44444 - protein, 16 aa, BK virus
TDIQSRIVEWKERLDS

SEQ ID NO: 44445 - protein, 16 aa, BK virus
DIQSRIVEWKERLDSE

SEQ ID NO: 44446 - protein, 16 aa, BK virus
IQSRIVEWKERLDSEI

SEQ ID NO: 44447 - protein, 16 aa, BK virus
QSRIVEWKERLDSEIS

SEQ ID NO: 44448 - protein, 16 aa, BK virus
SRIVEWKERLDSEISM

SEQ ID NO: 44449 - protein, 16 aa, BK virus
RIVEWKERLDSEISMY

SEQ ID NO: 44450 - protein, 16 aa, BK virus
IVEWKERLDSEISMYT

SEQ ID NO: 44451 - protein, 16 aa, BK virus
VEWKERLDSEISMYTF

SEQ ID NO: 44452 - protein, 16 aa, BK virus
EWKERLDSEISMYTFS

SEQ ID NO: 44453 - protein, 16 aa, BK virus
WKERLDSEISMYTFSR

SEQ ID NO: 44454 - protein, 16 aa, BK virus
KERLDSEISMYTFSRM

SEQ ID NO: 44455 - protein, 16 aa, BK virus
ERLDSEISMYTFSRMK

SEQ ID NO: 44456 - protein, 16 aa, BK virus
RLDSEISMYTFSRMKY

SEQ ID NO: 44457 - protein, 16 aa, BK virus
LDSEISMYTFSRMKYN

SEQ ID NO: 44458 - protein, 16 aa, BK virus
DSEISMYTFSRMKYNI

SEQ ID NO: 44459 - protein, 16 aa, BK virus
SEISMYTFSRMKYNIC

SEQ ID NO: 44460 - protein, 16 aa, BK virus
EISMYTFSRMKYNICM

SEQ ID NO: 44461 - protein, 16 aa, BK virus
ISMYTFSRMKYNICMG

SEQ ID NO: 44462 - protein, 16 aa, BK virus
SMYTFSRMKYNICMGK

SEQ ID NO: 44463 - protein, 16 aa, BK virus
MYTFSRMKYNICMGKC

SEQ ID NO: 44464 - protein, 16 aa, BK virus
YTFSRMKYNICMGKCI

SEQ ID NO: 44465 - protein, 16 aa, BK virus
TFSRMKYNICMGKCIL

SEQ ID NO: 44466 - protein, 16 aa, BK virus
FSRMKYNICMGKCILD

SEQ ID NO: 44467 - protein, 16 aa, BK virus
SRMKYNICMGKCILDI

SEQ ID NO: 44468 - protein, 16 aa, BK virus
RMKYNICMGKCILDIT

SEQ ID NO: 44469 - protein, 16 aa, BK virus
MKYNICMGKCILDITR

SEQ ID NO: 44470 - protein, 16 aa, BK virus
KYNICMGKCILDITRE

SEQ ID NO: 44471 - protein, 16 aa, BK virus
YNICMGKCILDITREE

SEQ ID NO: 44472 - protein, 16 aa, BK virus
NICMGKCILDITREED

SEQ ID NO: 44473 - protein, 16 aa, BK virus
ICMGKCILDITREEDS

SEQ ID NO: 44474 - protein, 16 aa, BK virus
CMGKCILDITREEDSE

SEQ ID NO: 44475 - protein, 16 aa, BK virus
MGKCILDITREEDSET

SEQ ID NO: 44476 - protein, 16 aa, BK virus
GKCILDITREEDSETE

SEQ ID NO: 44477 - protein, 16 aa, BK virus
KCILDITREEDSETED

SEQ ID NO: 44478 - protein, 16 aa, BK virus
CILDITREEDSETEDS

SEQ ID NO: 44479 - protein, 16 aa, BK virus
ILDITREEDSETEDSG

SEQ ID NO: 44480 - protein, 16 aa, BK virus
LDITREEDSETEDSGH

SEQ ID NO: 44481 - protein, 16 aa, BK virus
DITREEDSETEDSGHG

SEQ ID NO: 44482 - protein, 16 aa, BK virus
ITREEDSETEDSGHGS

SEQ ID NO: 44483 - protein, 16 aa, BK virus
TREEDSETEDSGHGSS

SEQ ID NO: 44484 - protein, 16 aa, BK virus
REEDSETEDSGHGSST

SEQ ID NO: 44485 - protein, 16 aa, BK virus
EEDSETEDSGHGSSTE

SEQ ID NO: 44486 - protein, 16 aa, BK virus
EDSETEDSGHGSSTES

SEQ ID NO: 44487 - protein, 16 aa, BK virus
DSETEDSGHGSSTESQ

SEQ ID NO: 44488 - protein, 16 aa, BK virus
SETEDSGHGSSTESQS

SEQ ID NO: 44489 - protein, 16 aa, BK virus
ETEDSGHGSSTESQSQ

SEQ ID NO: 44490 - protein, 16 aa, BK virus
TEDSGHGSSTESQSQC

SEQ ID NO: 44491 - protein, 16 aa, BK virus
EDSGHGSSTESQSQCS

SEQ ID NO: 44492 - protein, 16 aa, BK virus
DSGHGSSTESQSQCSS

SEQ ID NO: 44493 - protein, 16 aa, BK virus
SGHGSSTESQSQCSSQ

SEQ ID NO: 44494 - protein, 16 aa, BK virus
GHGSSTESQSQCSSQV

SEQ ID NO: 44495 - protein, 16 aa, BK virus
HGSSTESQSQCSSQVS

SEQ ID NO: 44496 - protein, 16 aa, BK virus
GSSTESQSQCSSQVSD

SEQ ID NO: 44497 - protein, 16 aa, BK virus
SSTESQSQCSSQVSDT

SEQ ID NO: 44498 - protein, 16 aa, BK virus
STESQSQCSSQVSDTS

SEQ ID NO: 44499 - protein, 16 aa, BK virus
TESQSQCSSQVSDTSA

SEQ ID NO: 44500 - protein, 16 aa, BK virus
ESQSQCSSQVSDTSAP

SEQ ID NO: 44501 - protein, 16 aa, BK virus
SQSQCSSQVSDTSAPA

SEQ ID NO: 44502 - protein, 16 aa, BK virus
QSQCSSQVSDTSAPAE

SEQ ID NO: 44503 - protein, 16 aa, BK virus
SQCSSQVSDTSAPAED

SEQ ID NO: 44504 - protein, 16 aa, BK virus
QCSSQVSDTSAPAEDS

SEQ ID NO: 44505 - protein, 16 aa, BK virus
CSSQVSDTSAPAEDSQ

SEQ ID NO: 44506 - protein, 16 aa, BK virus
SSQVSDTSAPAEDSQR

SEQ ID NO: 44507 - protein, 16 aa, BK virus
SQVSDTSAPAEDSQRS

SEQ ID NO: 44508 - protein, 16 aa, BK virus
QVSDTSAPAEDSQRSD

SEQ ID NO: 44509 - protein, 16 aa, BK virus
VSDTSAPAEDSQRSDP

SEQ ID NO: 44510 - protein, 16 aa, BK virus
SDTSAPAEDSQRSDPH

SEQ ID NO: 44511 - protein, 16 aa, BK virus
DTSAPAEDSQRSDPHS

SEQ ID NO: 44512 - protein, 16 aa, BK virus
TSAPAEDSQRSDPHSQ

SEQ ID NO: 44513 - protein, 16 aa, BK virus
SAPAEDSQRSDPHSQE

SEQ ID NO: 44514 - protein, 16 aa, BK virus
APAEDSQRSDPHSQEL

SEQ ID NO: 44515 - protein, 16 aa, BK virus
PAEDSQRSDPHSQELH

SEQ ID NO: 44516 - protein, 16 aa, BK virus
AEDSQRSDPHSQELHL

SEQ ID NO: 44517 - protein, 16 aa, BK virus
EDSQRSDPHSQELHLC

SEQ ID NO: 44518 - protein, 16 aa, BK virus
DSQRSDPHSQELHLCK

SEQ ID NO: 44519 - protein, 16 aa, BK virus
SQRSDPHSQELHLCKG

SEQ ID NO: 44520 - protein, 16 aa, BK virus
QRSDPHSQELHLCKGF

SEQ ID NO: 44521 - protein, 16 aa, BK virus
RSDPHSQELHLCKGFQ

SEQ ID NO: 44522 - protein, 16 aa, BK virus
SDPHSQELHLCKGFQC

SEQ ID NO: 44523 - protein, 16 aa, BK virus
DPHSQELHLCKGFQCF

SEQ ID NO: 44524 - protein, 16 aa, BK virus
PHSQELHLCKGFQCFK

SEQ ID NO: 44525 - protein, 16 aa, BK virus
HSQELHLCKGFQCFKR

SEQ ID NO: 44526 - protein, 16 aa, BK virus
SQELHLCKGFQCFKRP

SEQ ID NO: 44527 - protein, 16 aa, BK virus
QELHLCKGFQCFKRPK

SEQ ID NO: 44528 - protein, 16 aa, BK virus
ELHLCKGFQCFKRPKT

SEQ ID NO: 44529 - protein, 16 aa, BK virus
LHLCKGFQCFKRPKTP

SEQ ID NO: 44530 - protein, 16 aa, BK virus
HLCKGFQCFKRPKTPP

SEQ ID NO: 44531 - protein, 16 aa, BK virus
LCKGFQCFKRPKTPPP

SEQ ID NO: 44532 - protein, 16 aa, BK virus
CKGFQCFKRPKTPPPK

SEQ ID NO: 44533 - protein, 16 aa, BK virus
MYMYNKSTCLKHFGLQ

SEQ ID NO: 44534 - protein, 16 aa, BK virus
YMYNKSTCLKHFGLQL

SEQ ID NO: 44535 - protein, 16 aa, BK virus
MYNKSTCLKHFGLQLS

SEQ ID NO: 44536 - protein, 16 aa, BK virus
YNKSTCLKHFGLQLSL

SEQ ID NO: 44537 - protein, 16 aa, BK virus
NKSTCLKHFGLQLSLF

SEQ ID NO: 44538 - protein, 16 aa, BK virus
KSTCLKHFGLQLSLFV

SEQ ID NO: 44539 - protein, 16 aa, BK virus
STCLKHFGLQLSLFVN

SEQ ID NO: 44540 - protein, 16 aa, BK virus
TCLKHFGLQLSLFVNI

SEQ ID NO: 44541 - protein, 16 aa, BK virus
CLKHFGLQLSLFVNIS

SEQ ID NO: 44542 - protein, 16 aa, BK virus
LKHFGLQLSLFVNISY

SEQ ID NO: 44543 - protein, 16 aa, BK virus
KHFGLQLSLFVNISYH

SEQ ID NO: 44544 - protein, 16 aa, BK virus
HFGLQLSLFVNISYHI

SEQ ID NO: 44545 - protein, 16 aa, BK virus
FGLQLSLFVNISYHIW

SEQ ID NO: 44546 - protein, 16 aa, BK virus
GLQLSLFVNISYHIWV

SEQ ID NO: 44547 - protein, 16 aa, BK virus
LQLSLFVNISYHIWVP

SEQ ID NO: 44548 - protein, 16 aa, BK virus
QLSLFVNISYHIWVPW

SEQ ID NO: 44549 - protein, 16 aa, BK virus
LSLFVNISYHIWVPWK

SEQ ID NO: 44550 - protein, 16 aa, BK virus
SLFVNISYHIWVPWKS

SEQ ID NO: 44551 - protein, 16 aa, BK virus
LFVNISYHIWVPWKSF

SEQ ID NO: 44552 - protein, 16 aa, BK virus
FVNISYHIWVPWKSFC

SEQ ID NO: 44553 - protein, 16 aa, BK virus
VNISYHIWVPWKSFCA

SEQ ID NO: 44554 - protein, 16 aa, BK virus
NISYHIWVPWKSFCAI

SEQ ID NO: 44555 - protein, 16 aa, BK virus
ISYHIWVPWKSFCAIK

SEQ ID NO: 44556 - protein, 16 aa, BK virus
SYHIWVPWKSFCAIKH

SEQ ID NO: 44557 - protein, 16 aa, BK virus
YHIWVPWKSFCAIKHP

SEQ ID NO: 44558 - protein, 16 aa, BK virus
HIWVPWKSFCAIKHPN

SEQ ID NO: 44559 - protein, 16 aa, BK virus
IWVPWKSFCAIKHPNL

SEQ ID NO: 44560 - protein, 16 aa, BK virus
WVPWKSFCAIKHPNLF

SEQ ID NO: 44561 - protein, 16 aa, BK virus
VPWKSFCAIKHPNLFY

SEQ ID NO: 44562 - protein, 16 aa, BK virus
PWKSFCAIKHPNLFYL

SEQ ID NO: 44563 - protein, 16 aa, BK virus
WKSFCAIKHPNLFYLG

SEQ ID NO: 44564 - protein, 16 aa, BK virus
KSFCAIKHPNLFYLGF

SEQ ID NO: 44565 - protein, 16 aa, BK virus
SFCAIKHPNLFYLGFH

SEQ ID NO: 44566 - protein, 16 aa, BK virus
FCAIKHPNLFYLGFHT

SEQ ID NO: 44567 - protein, 16 aa, BK virus
CAIKHPNLFYLGFHTI

SEQ ID NO: 44568 - protein, 16 aa, BK virus
AIKHPNLFYLGFHTIH

SEQ ID NO: 44569 - protein, 16 aa, BK virus
IKHPNLFYLGFHTIHR

SEQ ID NO: 44570 - protein, 16 aa, BK virus
KHPNLFYLGFHTIHRL

SEQ ID NO: 44571 - protein, 16 aa, BK virus
HPNLFYLGFHTIHRLP

SEQ ID NO: 44572 - protein, 16 aa, BK virus
PNLFYLGFHTIHRLPI

SEQ ID NO: 44573 - protein, 16 aa, BK virus
NLFYLGFHTIHRLPIH

SEQ ID NO: 44574 - protein, 16 aa, BK virus
LFYLGFHTIHRLPIHS

SEQ ID NO: 44575 - protein, 16 aa, BK virus
FYLGFHTIHRLPIHSL

SEQ ID NO: 44576 - protein, 16 aa, BK virus
YLGFHTIHRLPIHSLG

SEQ ID NO: 44577 - protein, 16 aa, BK virus
LGFHTIHRLPIHSLGS

SEQ ID NO: 44578 - protein, 16 aa, BK virus
GFHTIHRLPIHSLGSP

SEQ ID NO: 44579 - protein, 16 aa, BK virus
FHTIHRLPIHSLGSPV

SEQ ID NO: 44580 - protein, 16 aa, BK virus
HTIHRLPIHSLGSPVY

SEQ ID NO: 44581 - protein, 16 aa, BK virus
TIHRLPIHSLGSPVYK

SEQ ID NO: 44582 - protein, 16 aa, BK virus
IHRLPIHSLGSPVYKV

SEQ ID NO: 44583 - protein, 16 aa, BK virus
HRLPIHSLGSPVYKVT

SEQ ID NO: 44584 - protein, 16 aa, BK virus
QKGNWVRILYRSFSQA

SEQ ID NO: 44585 - protein, 16 aa, BK virus
KGNWVRILYRSFSQAD

SEQ ID NO: 44586 - protein, 16 aa, BK virus
GNWVRILYRSFSQADL

SEQ ID NO: 44587 - protein, 16 aa, BK virus
NWVRILYRSFSQADLK

SEQ ID NO: 44588 - protein, 16 aa, BK virus
WVRILYRSFSQADLKI

SEQ ID NO: 44589 - protein, 16 aa, BK virus
VRILYRSFSQADLKIS

SEQ ID NO: 44590 - protein, 16 aa, BK virus
RILYRSFSQADLKISC

SEQ ID NO: 44591 - protein, 16 aa, BK virus
ILYRSFSQADLKISCK

SEQ ID NO: 44592 - protein, 16 aa, BK virus
LYRSFSQADLKISCKA

SEQ ID NO: 44593 - protein, 16 aa, BK virus
YRSFSQADLKISCKAS

SEQ ID NO: 44594 - protein, 16 aa, BK virus
RSFSQADLKISCKASP

SEQ ID NO: 44595 - protein, 16 aa, BK virus
SFSQADLKISCKASPL

SEQ ID NO: 44596 - protein, 16 aa, BK virus
FSQADLKISCKASPLL

SEQ ID NO: 44597 - protein, 16 aa, BK virus
SQADLKISCKASPLLC

SEQ ID NO: 44598 - protein, 16 aa, BK virus
QADLKISCKASPLLCS

SEQ ID NO: 44599 - protein, 16 aa, BK virus
ADLKISCKASPLLCSR

SEQ ID NO: 44600 - protein, 16 aa, BK virus
DLKISCKASPLLCSRA

SEQ ID NO: 44601 - protein, 16 aa, BK virus
LKISCKASPLLCSRAV

SEQ ID NO: 44602 - protein, 16 aa, BK virus
KISCKASPLLCSRAVS

SEQ ID NO: 44603 - protein, 16 aa, BK virus
ISCKASPLLCSRAVSK

SEQ ID NO: 44604 - protein, 16 aa, BK virus
SCKASPLLCSRAVSKQ

SEQ ID NO: 44605 - protein, 16 aa, BK virus
CKASPLLCSRAVSKQA

SEQ ID NO: 44606 - protein, 16 aa, BK virus
KASPLLCSRAVSKQAT

SEQ ID NO: 44607 - protein, 16 aa, BK virus
ASPLLCSRAVSKQATN

SEQ ID NO: 44608 - protein, 16 aa, BK virus
SPLLCSRAVSKQATNI

SEQ ID NO: 44609 - protein, 16 aa, BK virus
PLLCSRAVSKQATNIS

SEQ ID NO: 44610 - protein, 16 aa, BK virus
LLCSRAVSKQATNISS

SEQ ID NO: 44611 - protein, 16 aa, BK virus
NIQAISFTKRPHTLFI

SEQ ID NO: 44612 - protein, 16 aa, BK virus
QHCGSCVGHMKYWGNI

SEQ ID NO: 44613 - protein, 16 aa, BK virus
HCGSCVGHMKYWGNIF

SEQ ID NO: 44614 - protein, 16 aa, BK virus
CGSCVGHMKYWGNIFP

SEQ ID NO: 44615 - protein, 16 aa, BK virus
GSCVGHMKYWGNIFPS

SEQ ID NO: 44616 - protein, 16 aa, BK virus
SCVGHMKYWGNIFPSC

SEQ ID NO: 44617 - protein, 16 aa, BK virus
CVGHMKYWGNIFPSCE

SEQ ID NO: 44618 - protein, 16 aa, BK virus
VGHMKYWGNIFPSCES

SEQ ID NO: 44619 - protein, 16 aa, BK virus
GHMKYWGNIFPSCESP

SEQ ID NO: 44620 - protein, 16 aa, BK virus
HMKYWGNIFPSCESPK

SEQ ID NO: 44621 - protein, 16 aa, BK virus
MKYWGNIFPSCESPKI

SEQ ID NO: 44622 - protein, 16 aa, BK virus
KYWGNIFPSCESPKIP

SEQ ID NO: 44623 - protein, 16 aa, BK virus
YWGNIFPSCESPKIPS

SEQ ID NO: 44624 - protein, 16 aa, BK virus
WGNIFPSCESPKIPSI

SEQ ID NO: 44625 - protein, 16 aa, BK virus
GNIFPSCESPKIPSIF

SEQ ID NO: 44626 - protein, 16 aa, BK virus
NIFPSCESPKIPSIFI

SEQ ID NO: 44627 - protein, 16 aa, BK virus
IFPSCESPKIPSIFIS

SEQ ID NO: 44628 - protein, 16 aa, BK virus
FPSCESPKIPSIFIST

SEQ ID NO: 44629 - protein, 16 aa, BK virus
PSCESPKIPSIFISTG

SEQ ID NO: 44630 - protein, 16 aa, BK virus
SCESPKIPSIFISTGI

SEQ ID NO: 44631 - protein, 16 aa, BK virus
CESPKIPSIFISTGIR

SEQ ID NO: 44632 - protein, 16 aa, BK virus
ESPKIPSIFISTGIRY

SEQ ID NO: 44633 - protein, 16 aa, BK virus
SPKIPSIFISTGIRYP

SEQ ID NO: 44634 - protein, 16 aa, BK virus
PKIPSIFISTGIRYPA

SEQ ID NO: 44635 - protein, 16 aa, BK virus
KIPSIFISTGIRYPAL

SEQ ID NO: 44636 - protein, 16 aa, BK virus
IPSIFISTGIRYPALN

SEQ ID NO: 44637 - protein, 16 aa, BK virus
PSIFISTGIRYPALNW

SEQ ID NO: 44638 - protein, 16 aa, BK virus
SIFISTGIRYPALNWI

SEQ ID NO: 44639 - protein, 16 aa, BK virus
IFISTGIRYPALNWIS

SEQ ID NO: 44640 - protein, 16 aa, BK virus
FISTGIRYPALNWISI

SEQ ID NO: 44641 - protein, 16 aa, BK virus
ISTGIRYPALNWISIV

SEQ ID NO: 44642 - protein, 16 aa, BK virus
STGIRYPALNWISIVF

SEQ ID NO: 44643 - protein, 16 aa, BK virus
TGIRYPALNWISIVFV

SEQ ID NO: 44644 - protein, 16 aa, BK virus
GIRYPALNWISIVFVQ

SEQ ID NO: 44645 - protein, 16 aa, BK virus
IRYPALNWISIVFVQI

SEQ ID NO: 44646 - protein, 16 aa, BK virus
RYPALNWISIVFVQIG

SEQ ID NO: 44647 - protein, 16 aa, BK virus
YPALNWISIVFVQIGL

SEQ ID NO: 44648 - protein, 16 aa, BK virus
PALNWISIVFVQIGLM

SEQ ID NO: 44649 - protein, 16 aa, BK virus
ALNWISIVFVQIGLMV

SEQ ID NO: 44650 - protein, 16 aa, BK virus
LNWISIVFVQIGLMVS

SEQ ID NO: 44651 - protein, 16 aa, BK virus
NWISIVFVQIGLMVSI

SEQ ID NO: 44652 - protein, 16 aa, BK virus
WISIVFVQIGLMVSIH

SEQ ID NO: 44653 - protein, 16 aa, BK virus
ISIVFVQIGLMVSIHY

SEQ ID NO: 44654 - protein, 16 aa, BK virus
SIVFVQIGLMVSIHYL

SEQ ID NO: 44655 - protein, 16 aa, BK virus
IVFVQIGLMVSIHYLG

SEQ ID NO: 44656 - protein, 16 aa, BK virus
VFVQIGLMVSIHYLGL

SEQ ID NO: 44657 - protein, 16 aa, BK virus
FVQIGLMVSIHYLGLG

SEQ ID NO: 44658 - protein, 16 aa, BK virus
VQIGLMVSIHYLGLGC

SEQ ID NO: 44659 - protein, 16 aa, BK virus
QIGLMVSIHYLGLGCW

SEQ ID NO: 44660 - protein, 16 aa, BK virus
IGLMVSIHYLGLGCWV

SEQ ID NO: 44661 - protein, 16 aa, BK virus
GLMVSIHYLGLGCWVF

SEQ ID NO: 44662 - protein, 16 aa, BK virus
LMVSIHYLGLGCWVFR

SEQ ID NO: 44663 - protein, 16 aa, BK virus
MVSIHYLGLGCWVFRG

SEQ ID NO: 44664 - protein, 16 aa, BK virus
VSIHYLGLGCWVFRGY

SEQ ID NO: 44665 - protein, 16 aa, BK virus
SIHYLGLGCWVFRGYS

SEQ ID NO: 44666 - protein, 16 aa, BK virus
IHYLGLGCWVFRGYST

SEQ ID NO: 44667 - protein, 16 aa, BK virus
HYLGLGCWVFRGYSTI

SEQ ID NO: 44668 - protein, 16 aa, BK virus
YLGLGCWVFRGYSTIR

SEQ ID NO: 44669 - protein, 16 aa, BK virus
LGLGCWVFRGYSTIRV

SEQ ID NO: 44670 - protein, 16 aa, BK virus
GLGCWVFRGYSTIRVL

SEQ ID NO: 44671 - protein, 16 aa, BK virus
HSLHFQGFSTYSKEVE

SEQ ID NO: 44672 - protein, 16 aa, BK virus
SLHFQGFSTYSKEVEI

SEQ ID NO: 44673 - protein, 16 aa, BK virus
LHFQGFSTYSKEVEIT

SEQ ID NO: 44674 - protein, 16 aa, BK virus
HFQGFSTYSKEVEITA

SEQ ID NO: 44675 - protein, 16 aa, BK virus
FQGFSTYSKEVEITAL

SEQ ID NO: 44676 - protein, 16 aa, BK virus
QGFSTYSKEVEITALN

SEQ ID NO: 44677 - protein, 16 aa, BK virus
GFSTYSKEVEITALNR

SEQ ID NO: 44678 - protein, 16 aa, BK virus
FSTYSKEVEITALNRF

SEQ ID NO: 44679 - protein, 16 aa, BK virus
STYSKEVEITALNRFS

SEQ ID NO: 44680 - protein, 16 aa, BK virus
TYSKEVEITALNRFSS

SEQ ID NO: 44681 - protein, 16 aa, BK virus
YSKEVEITALNRFSST

SEQ ID NO: 44682 - protein, 16 aa, BK virus
SKEVEITALNRFSSTM

SEQ ID NO: 44683 - protein, 16 aa, BK virus
KEVEITALNRFSSTML

SEQ ID NO: 44684 - protein, 16 aa, BK virus
EVEITALNRFSSTMLM

SEQ ID NO: 44685 - protein, 16 aa, BK virus
VEITALNRFSSTMLMH

SEQ ID NO: 44686 - protein, 16 aa, BK virus
EITALNRFSSTMLMHF

SEQ ID NO: 44687 - protein, 16 aa, BK virus
ITALNRFSSTMLMHFL

SEQ ID NO: 44688 - protein, 16 aa, BK virus
PCMKVKHASYSNNLCL

SEQ ID NO: 44689 - protein, 16 aa, BK virus
CMKVKHASYSNNLCLY

SEQ ID NO: 44690 - protein, 16 aa, BK virus
MKVKHASYSNNLCLYS

SEQ ID NO: 44691 - protein, 16 aa, BK virus
KVKHASYSNNLCLYSY

SEQ ID NO: 44692 - protein, 16 aa, BK virus
VKHASYSNNLCLYSYS

SEQ ID NO: 44693 - protein, 16 aa, BK virus
KHASYSNNLCLYSYSL

SEQ ID NO: 44694 - protein, 16 aa, BK virus
HASYSNNLCLYSYSLP

SEQ ID NO: 44695 - protein, 16 aa, BK virus
ASYSNNLCLYSYSLPH

SEQ ID NO: 44696 - protein, 16 aa, BK virus
SYSNNLCLYSYSLPHQ

SEQ ID NO: 44697 - protein, 16 aa, BK virus
IGEGNSCCAVTGKHFS

SEQ ID NO: 44698 - protein, 16 aa, BK virus
GEGNSCCAVTGKHFSL

SEQ ID NO: 44699 - protein, 16 aa, BK virus
EGNSCCAVTGKHFSLW

SEQ ID NO: 44700 - protein, 16 aa, BK virus
GNSCCAVTGKHFSLWA

SEQ ID NO: 44701 - protein, 16 aa, BK virus
NSCCAVTGKHFSLWAI

SEQ ID NO: 44702 - protein, 16 aa, BK virus
SCCAVTGKHFSLWAIT

SEQ ID NO: 44703 - protein, 16 aa, BK virus
CCAVTGKHFSLWAITA

SEQ ID NO: 44704 - protein, 16 aa, BK virus
CAVTGKHFSLWAITAK

SEQ ID NO: 44705 - protein, 16 aa, BK virus
AVTGKHFSLWAITAKV

SEQ ID NO: 44706 - protein, 16 aa, BK virus
VTGKHFSLWAITAKVI

SEQ ID NO: 44707 - protein, 16 aa, BK virus
TGKHFSLWAITAKVIF

SEQ ID NO: 44708 - protein, 16 aa, BK virus
GKHFSLWAITAKVIFS

SEQ ID NO: 44709 - protein, 16 aa, BK virus
KHFSLWAITAKVIFST

SEQ ID NO: 44710 - protein, 16 aa, BK virus
FWHLHGFLWLFGSCPW

SEQ ID NO: 44711 - protein, 16 aa, BK virus
WHLHGFLWLFGSCPWT

SEQ ID NO: 44712 - protein, 16 aa, BK virus
HLHGFLWLFGSCPWTL

SEQ ID NO: 44713 - protein, 16 aa, BK virus
LHGFLWLFGSCPWTLS

SEQ ID NO: 44714 - protein, 16 aa, BK virus
HGFLWLFGSCPWTLSF

SEQ ID NO: 44715 - protein, 16 aa, BK virus
GFLWLFGSCPWTLSFS

SEQ ID NO: 44716 - protein, 16 aa, BK virus
FLWLFGSCPWTLSFSF

SEQ ID NO: 44717 - protein, 16 aa, BK virus
LWLFGSCPWTLSFSFG

SEQ ID NO: 44718 - protein, 16 aa, BK virus
WLFGSCPWTLSFSFGW

SEQ ID NO: 44719 - protein, 16 aa, BK virus
LFGSCPWTLSFSFGWG

SEQ ID NO: 44720 - protein, 16 aa, BK virus
FGSCPWTLSFSFGWGH

SEQ ID NO: 44721 - protein, 16 aa, BK virus
GSCPWTLSFSFGWGHL

SEQ ID NO: 44722 - protein, 16 aa, BK virus
SCPWTLSFSFGWGHLH

SEQ ID NO: 44723 - protein, 16 aa, BK virus
CPWTLSFSFGWGHLHM

SEQ ID NO: 44724 - protein, 16 aa, BK virus
PWTLSFSFGWGHLHML

SEQ ID NO: 44725 - protein, 16 aa, BK virus
WTLSFSFGWGHLHMLQ

SEQ ID NO: 44726 - protein, 16 aa, BK virus
TLSFSFGWGHLHMLQE

SEQ ID NO: 44727 - protein, 16 aa, BK virus
LSFSFGWGHLHMLQEQ

SEQ ID NO: 44728 - protein, 16 aa, BK virus
SFSFGWGHLHMLQEQV

SEQ ID NO: 44729 - protein, 16 aa, BK virus
FSFGWGHLHMLQEQVL

SEQ ID NO: 44730 - protein, 16 aa, BK virus
SFGWGHLHMLQEQVLQ

SEQ ID NO: 44731 - protein, 16 aa, BK virus
FGWGHLHMLQEQVLQS

SEQ ID NO: 44732 - protein, 16 aa, BK virus
GWGHLHMLQEQVLQSR

SEQ ID NO: 44733 - protein, 16 aa, BK virus
WGHLHMLQEQVLQSRT

SEQ ID NO: 44734 - protein, 16 aa, BK virus
GHLHMLQEQVLQSRTG

SEQ ID NO: 44735 - protein, 16 aa, BK virus
HLHMLQEQVLQSRTGL

SEQ ID NO: 44736 - protein, 16 aa, BK virus
LHMLQEQVLQSRTGLE

SEQ ID NO: 44737 - protein, 16 aa, BK virus
HMLQEQVLQSRTGLEV

SEQ ID NO: 44738 - protein, 16 aa, BK virus
MLQEQVLQSRTGLEVK

SEQ ID NO: 44739 - protein, 16 aa, BK virus
LQEQVLQSRTGLEVKA

SEQ ID NO: 44740 - protein, 16 aa, BK virus
QEQVLQSRTGLEVKAT

SEQ ID NO: 44741 - protein, 16 aa, BK virus
EQVLQSRTGLEVKATS

SEQ ID NO: 44742 - protein, 16 aa, BK virus
QVLQSRTGLEVKATSI

SEQ ID NO: 44743 - protein, 16 aa, BK virus
VLQSRTGLEVKATSIE

SEQ ID NO: 44744 - protein, 16 aa, BK virus
LQSRTGLEVKATSIEE

SEQ ID NO: 44745 - protein, 16 aa, BK virus
QSRTGLEVKATSIEEQ

SEQ ID NO: 44746 - protein, 16 aa, BK virus
SRTGLEVKATSIEEQF

SEQ ID NO: 44747 - protein, 16 aa, BK virus
RTGLEVKATSIEEQFF

SEQ ID NO: 44748 - protein, 16 aa, BK virus
TGLEVKATSIEEQFFD

SEQ ID NO: 44749 - protein, 16 aa, BK virus
TLLNVHFVDFLSPFFV

SEQ ID NO: 44750 - protein, 16 aa, BK virus
LLLYCQHHLYYKYGQN

SEQ ID NO: 44751 - protein, 16 aa, BK virus
LLYCQHHLYYKYGQNV

SEQ ID NO: 44752 - protein, 16 aa, BK virus
LYCQHHLYYKYGQNVH

SEQ ID NO: 44753 - protein, 16 aa, BK virus
YCQHHLYYKYGQNVHG

SEQ ID NO: 44754 - protein, 16 aa, BK virus
CQHHLYYKYGQNVHGY

SEQ ID NO: 44755 - protein, 16 aa, BK virus
QHHLYYKYGQNVHGYL

SEQ ID NO: 44756 - protein, 16 aa, BK virus
HHLYYKYGQNVHGYLP

SEQ ID NO: 44757 - protein, 16 aa, BK virus
HLYYKYGQNVHGYLPF

SEQ ID NO: 44758 - protein, 16 aa, BK virus
LYYKYGQNVHGYLPFQ

SEQ ID NO: 44759 - protein, 16 aa, BK virus
YYKYGQNVHGYLPFQL

SEQ ID NO: 44760 - protein, 16 aa, BK virus
YKYGQNVHGYLPFQLL

SEQ ID NO: 44761 - protein, 16 aa, BK virus
KYGQNVHGYLPFQLLV

SEQ ID NO: 44762 - protein, 16 aa, BK virus
QKYLHQETEYHSTHLG

SEQ ID NO: 44763 - protein, 16 aa, BK virus
TIPKPCLIADRGLQWK

SEQ ID NO: 44764 - protein, 16 aa, BK virus
IPKPCLIADRGLQWKL

SEQ ID NO: 44765 - protein, 16 aa, BK virus
PKPCLIADRGLQWKLC

SEQ ID NO: 44766 - protein, 16 aa, BK virus
KPCLIADRGLQWKLCD

SEQ ID NO: 44767 - protein, 16 aa, BK virus
PCLIADRGLQWKLCDP

SEQ ID NO: 44768 - protein, 16 aa, BK virus
CLIADRGLQWKLCDPN

SEQ ID NO: 44769 - protein, 16 aa, BK virus
LIADRGLQWKLCDPNH

SEQ ID NO: 44770 - protein, 16 aa, BK virus
IADRGLQWKLCDPNHQ

SEQ ID NO: 44771 - protein, 16 aa, BK virus
ADRGLQWKLCDPNHQR

SEQ ID NO: 44772 - protein, 16 aa, BK virus
DRGLQWKLCDPNHQRT

SEQ ID NO: 44773 - protein, 16 aa, BK virus
RGLQWKLCDPNHQRTY

SEQ ID NO: 44774 - protein, 16 aa, BK virus
GLQWKLCDPNHQRTYT

SEQ ID NO: 44775 - protein, 16 aa, BK virus
LQWKLCDPNHQRTYTL

SEQ ID NO: 44776 - protein, 16 aa, BK virus
QWKLCDPNHQRTYTLL

SEQ ID NO: 44777 - protein, 16 aa, BK virus
WKLCDPNHQRTYTLLE

SEQ ID NO: 44778 - protein, 16 aa, BK virus
KLCDPNHQRTYTLLEL

SEQ ID NO: 44779 - protein, 16 aa, BK virus
LCDPNHQRTYTLLELR

SEQ ID NO: 44780 - protein, 16 aa, BK virus
CDPNHQRTYTLLELRN

SEQ ID NO: 44781 - protein, 16 aa, BK virus
PQEHQQLQHMFEELGL

SEQ ID NO: 44782 - protein, 16 aa, BK virus
QQQPPQQQFQPLKILW

SEQ ID NO: 44783 - protein, 16 aa, BK virus
QQPPQQQFQPLKILWQ

SEQ ID NO: 44784 - protein, 16 aa, BK virus
QPPQQQFQPLKILWQQ

SEQ ID NO: 44785 - protein, 16 aa, BK virus
PPQQQFQPLKILWQQQ

SEQ ID NO: 44786 - protein, 16 aa, BK virus
PQQQFQPLKILWQQQP

SEQ ID NO: 44787 - protein, 16 aa, BK virus
QQQFQPLKILWQQQPQ

SEQ ID NO: 44788 - protein, 16 aa, BK virus
QQFQPLKILWQQQPQI

SEQ ID NO: 44789 - protein, 16 aa, BK virus
QFQPLKILWQQQPQIH

SEQ ID NO: 44790 - protein, 16 aa, BK virus
FQPLKILWQQQPQIHW

SEQ ID NO: 44791 - protein, 16 aa, BK virus
QPLKILWQQQPQIHWQ

SEQ ID NO: 44792 - protein, 16 aa, BK virus
PLKILWQQQPQIHWQL

SEQ ID NO: 44793 - protein, 16 aa, BK virus
LKILWQQQPQIHWQLG

SEQ ID NO: 44794 - protein, 16 aa, BK virus
KILWQQQPQIHWQLGP

SEQ ID NO: 44795 - protein, 16 aa, BK virus
ILWQQQPQIHWQLGPP

SEQ ID NO: 44796 - protein, 16 aa, BK virus
LWQQQPQIHWQLGPPK

SEQ ID NO: 44797 - protein, 16 aa, BK virus
WQQQPQIHWQLGPPKV

SEQ ID NO: 44798 - protein, 16 aa, BK virus
QQQPQIHWQLGPPKVL

SEQ ID NO: 44799 - protein, 16 aa, BK virus
QQPQIHWQLGPPKVLE

SEQ ID NO: 44800 - protein, 16 aa, BK virus
QPQIHWQLGPPKVLEQ

SEQ ID NO: 44801 - protein, 16 aa, BK virus
PQIHWQLGPPKVLEQH

SEQ ID NO: 44802 - protein, 16 aa, BK virus
QIHWQLGPPKVLEQHP

SEQ ID NO: 44803 - protein, 16 aa, BK virus
TWKYKKKGITYLGVFY

SEQ ID NO: 44804 - protein, 16 aa, BK virus
WKYKKKGITYLGVFYR

SEQ ID NO: 44805 - protein, 16 aa, BK virus
KYKKKGITYLGVFYRV

SEQ ID NO: 44806 - protein, 16 aa, BK virus
YKKKGITYLGVFYRVF

SEQ ID NO: 44807 - protein, 16 aa, BK virus
KKKGITYLGVFYRVFY

SEQ ID NO: 44808 - protein, 16 aa, BK virus
KKGITYLGVFYRVFYS

SEQ ID NO: 44809 - protein, 16 aa, BK virus
KGITYLGVFYRVFYSR

SEQ ID NO: 44810 - protein, 16 aa, BK virus
SSGTFVFPVYTVFTST

SEQ ID NO: 44811 - protein, 16 aa, BK virus
SGTFVFPVYTVFTSTK

SEQ ID NO: 44812 - protein, 16 aa, BK virus
GTFVFPVYTVFTSTKF

SEQ ID NO: 44813 - protein, 16 aa, BK virus
TFVFPVYTVFTSTKFQ

SEQ ID NO: 44814 - protein, 16 aa, BK virus
FVFPVYTVFTSTKFQQ

SEQ ID NO: 44815 - protein, 16 aa, BK virus
VFPVYTVFTSTKFQQK

SEQ ID NO: 44816 - protein, 16 aa, BK virus
FPVYTVFTSTKFQQKL

SEQ ID NO: 44817 - protein, 16 aa, BK virus
NKNKNPLSSFFCSSPG

SEQ ID NO: 44818 - protein, 16 aa, BK virus
KNKNPLSSFFCSSPGF

SEQ ID NO: 44819 - protein, 16 aa, BK virus
NKNPLSSFFCSSPGFT

SEQ ID NO: 44820 - protein, 16 aa, BK virus
KNPLSSFFCSSPGFTN

SEQ ID NO: 44821 - protein, 16 aa, BK virus
NPLSSFFCSSPGFTNF

SEQ ID NO: 44822 - protein, 16 aa, BK virus
PLSSFFCSSPGFTNFH

SEQ ID NO: 44823 - protein, 16 aa, BK virus
LGTRPRFLGSQNMSVM

SEQ ID NO: 44824 - protein, 16 aa, BK virus
GTRPRFLGSQNMSVMH

SEQ ID NO: 44825 - protein, 16 aa, BK virus
TRPRFLGSQNMSVMHF

SEQ ID NO: 44826 - protein, 16 aa, BK virus
RPRFLGSQNMSVMHFP

SEQ ID NO: 44827 - protein, 16 aa, BK virus
PRFLGSQNMSVMHFPS

SEQ ID NO: 44828 - protein, 16 aa, BK virus
AAPPCESCTFLPEVMV

SEQ ID NO: 44829 - protein, 16 aa, BK virus
APPCESCTFLPEVMVW

SEQ ID NO: 44830 - protein, 16 aa, BK virus
PPCESCTFLPEVMVWL

SEQ ID NO: 44831 - protein, 16 aa, BK virus
PCESCTFLPEVMVWLH

SEQ ID NO: 44832 - protein, 16 aa, BK virus
CESCTFLPEVMVWLHS

SEQ ID NO: 44833 - protein, 16 aa, BK virus
ESCTFLPEVMVWLHSP

SEQ ID NO: 44834 - protein, 16 aa, BK virus
SCTFLPEVMVWLHSPV

SEQ ID NO: 44835 - protein, 16 aa, BK virus
CTFLPEVMVWLHSPVS

SEQ ID NO: 44836 - protein, 16 aa, BK virus
TFLPEVMVWLHSPVSH

SEQ ID NO: 44837 - protein, 16 aa, BK virus
FLPEVMVWLHSPVSHA

SEQ ID NO: 44838 - protein, 16 aa, BK virus
LPEVMVWLHSPVSHAL

SEQ ID NO: 44839 - protein, 16 aa, BK virus
PEVMVWLHSPVSHALS

SEQ ID NO: 44840 - protein, 16 aa, BK virus
EVMVWLHSPVSHALSF

SEQ ID NO: 44841 - protein, 16 aa, BK virus
VMVWLHSPVSHALSFL

SEQ ID NO: 44842 - protein, 16 aa, BK virus
MVWLHSPVSHALSFLR

SEQ ID NO: 44843 - protein, 16 aa, BK virus
VWLHSPVSHALSFLRS

SEQ ID NO: 44844 - protein, 16 aa, BK virus
WLHSPVSHALSFLRSW

SEQ ID NO: 44845 - protein, 16 aa, BK virus
LHSPVSHALSFLRSWF

SEQ ID NO: 44846 - protein, 16 aa, BK virus
HSPVSHALSFLRSWFG

SEQ ID NO: 44847 - protein, 16 aa, BK virus
SPVSHALSFLRSWFGC

SEQ ID NO: 44848 - protein, 16 aa, BK virus
PVSHALSFLRSWFGCI

SEQ ID NO: 44849 - protein, 16 aa, BK virus
VSHALSFLRSWFGCIP

SEQ ID NO: 44850 - protein, 16 aa, BK virus
SHALSFLRSWFGCIPW

SEQ ID NO: 44851 - protein, 16 aa, BK virus
HALSFLRSWFGCIPWV

SEQ ID NO: 44852 - protein, 16 aa, BK virus
ALSFLRSWFGCIPWVS

SEQ ID NO: 44853 - protein, 16 aa, BK virus
LSFLRSWFGCIPWVSS

SEQ ID NO: 44854 - protein, 16 aa, BK virus
SFLRSWFGCIPWVSSS

SEQ ID NO: 44855 - protein, 16 aa, BK virus
FLRSWFGCIPWVSSSS

SEQ ID NO: 44856 - protein, 16 aa, BK virus
LRSWFGCIPWVSSSSL

SEQ ID NO: 44857 - protein, 16 aa, BK virus
RSWFGCIPWVSSSSLW

SEQ ID NO: 44858 - protein, 16 aa, BK virus
SWFGCIPWVSSSSLWP

SEQ ID NO: 44859 - protein, 16 aa, BK virus
WFGCIPWVSSSSLWPF

SEQ ID NO: 44860 - protein, 16 aa, BK virus
FGCIPWVSSSSLWPFF

SEQ ID NO: 44861 - protein, 16 aa, BK virus
GCIPWVSSSSLWPFFL

SEQ ID NO: 44862 - protein, 16 aa, BK virus
YIRGRGRLCLHPFSQV

SEQ ID NO: 44863 - protein, 16 aa, BK virus
IRGRGRLCLHPFSQVV

SEQ ID NO: 44864 - protein, 16 aa, BK virus
RGRGRLCLHPFSQVVR

SEQ ID NO: 44865 - protein, 16 aa, BK virus
GRGRLCLHPFSQVVRV

SEQ ID NO: 44866 - protein, 16 aa, BK virus
RGRLCLHPFSQVVRVW

SEQ ID NO: 44867 - protein, 16 aa, BK virus
GRLCLHPFSQVVRVWR

SEQ ID NO: 44868 - protein, 16 aa, BK virus
RLCLHPFSQVVRVWRL

SEQ ID NO: 44869 - protein, 16 aa, BK virus
LCLHPFSQVVRVWRLF

SEQ ID NO: 44870 - protein, 16 aa, BK virus
CLHPFSQVVRVWRLFL

SEQ ID NO: 44871 - protein, 16 aa, BK virus
LHPFSQVVRVWRLFLR

SEQ ID NO: 44872 - protein, 16 aa, BK virus
HPFSQVVRVWRLFLRP

SEQ ID NO: 44873 - protein, 16 aa, BK virus
PFSQVVRVWRLFLRPS

SEQ ID NO: 44874 - protein, 16 aa, BK virus
FSQVVRVWRLFLRPSK

SEQ ID NO: 44875 - protein, 16 aa, BK virus
SQVVRVWRLFLRPSKT

SEQ ID NO: 44876 - protein, 16 aa, BK virus
QVVRVWRLFLRPSKTI

SEQ ID NO: 44877 - protein, 16 aa, BK virus
VVRVWRLFLRPSKTIW

SEQ ID NO: 44878 - protein, 16 aa, BK virus
VRVWRLFLRPSKTIWG

SEQ ID NO: 44879 - protein, 16 aa, BK virus
RVWRLFLRPSKTIWGN

SEQ ID NO: 44880 - protein, 16 aa, BK virus
VWRLFLRPSKTIWGNP

SEQ ID NO: 44881 - protein, 16 aa, BK virus
WRLFLRPSKTIWGNPY

SEQ ID NO: 44882 - protein, 16 aa, BK virus
RLFLRPSKTIWGNPYS

SEQ ID NO: 44883 - protein, 16 aa, BK virus
LFLRPSKTIWGNPYSF

SEQ ID NO: 44884 - protein, 16 aa, BK virus
FLRPSKTIWGNPYSFA

SEQ ID NO: 44885 - protein, 16 aa, BK virus
LRPSKTIWGNPYSFAI

SEQ ID NO: 44886 - protein, 16 aa, BK virus
RPSKTIWGNPYSFAIF

SEQ ID NO: 44887 - protein, 16 aa, BK virus
PSKTIWGNPYSFAIFA

SEQ ID NO: 44888 - protein, 16 aa, BK virus
SKTIWGNPYSFAIFAK

SEQ ID NO: 44889 - protein, 239 aa, Homo sapiens; identical to SEQ ID NO: 6

SEQ ID NO: 44890 - protein, 233 aa, Homo sapiens
MSQSNRELVVDFLSYKLSQKGYSWSQFSDVEENRTEAPEGTESEMETPSAINGNPSWHLADSPAVNGATGHSSSLDAREVIPMAAVKQALREAGDEFELRYRRAFSDLTSQLHITPGTAYQSFEQVVNELFRDGVNWGRIVAFFSFGGALCVESVDKEMQVLVSRIAAWMATYLNDHLEPWIQENGGWDTFVELYGNNAAAESRKGQERFNRWFLTGMTVAGVVLLGSLFSRK

SEQ ID NO: 44891 - protein, 142 aa, Homo sapiens
MGAPTLPPAWQPFLKDHRISTFKNWPFLEGCACTPERMAEAGFIHCPTENEPDLAQCFFCFKELEGWEPDDDPIEEHKKHSSGCAFLSVKKQFEELTLGEFLKLDRERAKNKIAKETNNKKKEFEETAKKVRRAIEQLAAMD

SEQ ID NO: 44892 - protein, 350 aa, Homo sapiens [sequence omitted]

SEQ ID NO: 44893 - protein, 8 aa, Homo sapiens
ALSPVPPV

SEQ ID NO: 44894 - protein, 8 aa, Homo sapiens
TLLSLALV

SEQ ID NO: 44895 - protein, 8 aa, Homo sapiens
ALWMTEYL

SEQ ID NO: 44896 - protein, 8 aa, Homo sapiens
GVMCVESV

SEQ ID NO: 44897 - protein, 8 aa, Homo sapiens
PLFDFSWL

SEQ ID NO: 44898 - protein, 8 aa, Homo sapiens
SLKTLLSL

SEQ ID NO: 44899 - protein, 8 aa, Homo sapiens
ALSPVPPV

SEQ ID NO: 44900 - protein, 8 aa, Homo sapiens
WLSLKTLL

SEQ ID NO: 44901 - protein, 8 aa, Homo sapiens
SLKTLLSL

SEQ ID NO: 44902 - protein, 8 aa, Homo sapiens
PLFDFSWL

SEQ ID NO: 44903 - protein, 8 aa, Homo sapiens
ALWMTEYL

SEQ ID NO: 44904 - protein, 8 aa, Homo sapiens
GVMCVESV

SEQ ID NO: 44905 - protein, 8 aa, Homo sapiens
TLLSLALV

SEQ ID NO: 44906 - protein, 8 aa, Homo sapiens
EMSSQLHL

SEQ ID NO: 44907 - protein, 8 aa, Homo sapiens
LVGACITL

SEQ ID NO: 44908 - protein, 8 aa, Homo sapiens
FATVVEEL

SEQ ID NO: 44909 - protein, 8 aa, Homo sapiens
PLVDNIAL

SEQ ID NO: 44910 - protein, 8 aa, Homo sapiens
YLNRHLHT

SEQ ID NO: 44911 - protein, 8 aa, Homo sapiens
FDFSWLSL

SEQ ID NO: 44912 - protein, 8 aa, Homo sapiens
ALSPVPPV

SEQ ID NO: 44913 - protein, 8 aa, Homo sapiens
SLKTLLSL

SEQ ID NO: 44914 - protein, 8 aa, Homo sapiens
GVMCVESV

SEQ ID NO: 44915 - protein, 8 aa, Homo sapiens
YLNRHLHT

SEQ ID NO: 44916 - protein, 8 aa, Homo sapiens
TLLSLALV

SEQ ID NO: 44917 - protein, 8 aa, Homo sapiens
WLSLKTLL

SEQ ID NO: 44918 - protein, 8 aa, Homo sapiens
GVNWGRIV

SEQ ID NO: 44919 - protein, 8 aa, Homo sapiens
FTARGRFA

SEQ ID NO: 44920 - protein, 8 aa, Homo sapiens
ALWMTEYL

SEQ ID NO: 44921 - protein, 8 aa, Homo sapiens
PLFDFSWL

SEQ ID NO: 44922 - protein, 8 aa, Homo sapiens
ALSPVPPV

SEQ ID NO: 44923 - protein, 8 aa, Homo sapiens
ALWMTEYL

SEQ ID NO: 44924 - protein, 8 aa, Homo sapiens
TLLSLALV

SEQ ID NO: 44925 - protein, 8 aa, Homo sapiens
GVMCVESV

SEQ ID NO: 44926 - protein, 8 aa, Homo sapiens
LVGACITL

SEQ ID NO: 44927 - protein, 8 aa, Homo sapiens
ALSPVPPV

SEQ ID NO: 44928 - protein, 8 aa, Homo sapiens
GVMCVESV

SEQ ID NO: 44929 - protein, 8 aa, Homo sapiens
SQLHLTPF

SEQ ID NO: 44930 - protein, 8 aa, Homo sapiens
TLLSLALV

SEQ ID NO: 44931 - protein, 8 aa, Homo sapiens
RIVAFFEF

SEQ ID NO: 44932 - protein, 8 aa, Homo sapiens
KTLLSLAL

SEQ ID NO: 44933 - protein, 8 aa, Homo sapiens
ALWMTEYL

SEQ ID NO: 44934 - protein, 8 aa, Homo sapiens
LVGACITL

SEQ ID NO: 44935 - protein, 8 aa, Homo sapiens
FTARGRFA

SEQ ID NO: 44936 - protein, 8 aa, Homo sapiens
WLSLKTLL

SEQ ID NO: 44937 - protein, 8 aa, Homo sapiens
FATVVEEL

SEQ ID NO: 44938 - protein, 8 aa, Homo sapiens
RQAGDDFS

SEQ ID NO: 44939 - protein, 8 aa, Homo sapiens
ALSPVPPV

SEQ ID NO: 44940 - protein, 8 aa, Homo sapiens
TLLSLALV

SEQ ID NO: 44941 - protein, 8 aa, Homo sapiens
ALWMTEYL

SEQ ID NO: 44942 - protein, 8 aa, Homo sapiens
PLFDFSWL

SEQ ID NO: 44943 - protein, 8 aa, Homo sapiens
PLVDNIAL

SEQ ID NO: 44944 - protein, 8 aa, Homo sapiens
SLKTLLSL

SEQ ID NO: 44945 - protein, 8 aa, Homo sapiens
WLSLKTLL

SEQ ID NO: 44946 - protein, 8 aa, Homo sapiens
YLNRHLHT

SEQ ID NO: 44947 - protein, 8 aa, Homo sapiens
EMSSQLHL

SEQ ID NO: 44948 - protein, 8 aa, Homo sapiens
GVNWGRIV

SEQ ID NO: 44949 - protein, 8 aa, Homo sapiens
GVMCVESV

SEQ ID NO: 44950 - protein, 8 aa, Homo sapiens
AFFEFGGV

SEQ ID NO: 44951 - protein, 8 aa, Homo sapiens
PVPPVVHL

SEQ ID NO: 44952 - protein, 8 aa, Homo sapiens
CITLGAYL

SEQ ID NO: 44953 - protein, 8 aa, Homo sapiens
LVGACITL

SEQ ID NO: 44954 - protein, 8 aa, Homo sapiens
ALVGACIT

SEQ ID NO: 44955 - protein, 8 aa, Homo sapiens
YEWDAGDV

SEQ ID NO: 44956 - protein, 8 aa, Homo sapiens
EFGGVMCV

SEQ ID NO: 44957 - protein, 8 aa, Homo sapiens
SLALVGAC

SEQ ID NO: 44958 - protein, 8 aa, Homo sapiens
ALSPVPPV

SEQ ID NO: 44959 - protein, 8 aa, Homo sapiens
ALWMTEYL

SEQ ID NO: 44960 - protein, 8 aa, Homo sapiens
TLLSLALV

SEQ ID NO: 44961 - protein, 8 aa, Homo sapiens
PLFDFSWL

SEQ ID NO: 44962 - protein, 8 aa, Homo sapiens
PLVDNIAL

SEQ ID NO: 44963 - protein, 8 aa, Homo sapiens
SLKTLLSL

SEQ ID NO: 44964 - protein, 8 aa, Homo sapiens
YLNRHLHT

SEQ ID NO: 44965 - protein, 8 aa, Homo sapiens
EMSSQLHL

SEQ ID NO: 44966 - protein, 8 aa, Homo sapiens
WLSLKTLL

SEQ ID NO: 44967 - protein, 8 aa, Homo sapiens
YEWDAGDV

SEQ ID NO: 44968 - protein, 8 aa, Homo sapiens
GVMCVESV

SEQ ID NO: 44969 - protein, 8 aa, Homo sapiens
ALSPVPPV

SEQ ID NO: 44970 - protein, 8 aa, Homo sapiens
ALWMTEYL

SEQ ID NO: 44971 - protein, 8 aa, Homo sapiens
TLLSLALV

SEQ ID NO: 44972 - protein, 8 aa, Homo sapiens
PLFDFSWL

SEQ ID NO: 44973 - protein, 8 aa, Homo sapiens
PLVDNIAL

SEQ ID NO: 44974 - protein, 8 aa, Homo sapiens
SLKTLLSL

SEQ ID NO: 44975 - protein, 8 aa, Homo sapiens
WLSLKTLL

SEQ ID NO: 44976 - protein, 8 aa, Homo sapiens
EMSSQLHL

SEQ ID NO: 44977 - protein, 8 aa, Homo sapiens
GVMCVESV

SEQ ID NO: 44978 - protein, 8 aa, Homo sapiens
YLNRHLHT

SEQ ID NO: 44979 - protein, 8 aa, Homo sapiens
ALVGACIT

SEQ ID NO: 44980 - protein, 8 aa, Homo sapiens
LVGACITL

SEQ ID NO: 44981 - protein, 8 aa, Homo sapiens
PVPPVVHL

SEQ ID NO: 44982 - protein, 8 aa, Homo sapiens
EFGGVMCV

SEQ ID NO: 44983 - protein, 8 aa, Homo sapiens
CITLGAYL

SEQ ID NO: 44984 - protein, 8 aa, Homo sapiens
GVNWGRIV

SEQ ID NO: 44985 - protein, 8 aa, Homo sapiens
ALSPVPPV

SEQ ID NO: 44986 - protein, 8 aa, Homo sapiens
ALWMTEYL

SEQ ID NO: 44987 - protein, 8 aa, Homo sapiens
TLLSLALV

SEQ ID NO: 44988 - protein, 8 aa, Homo sapiens
PLFDFSWL

SEQ ID NO: 44989 - protein, 8 aa, Homo sapiens
PLVDNIAL

SEQ ID NO: 44990 - protein, 8 aa, Homo sapiens
EMSSQLHL

SEQ ID NO: 44991 - protein, 8 aa, Homo sapiens
WLSLKTLL

SEQ ID NO: 44992 - protein, 8 aa, Homo sapiens
GVMCVESV

SEQ ID NO: 44993 - protein, 8 aa, Homo sapiens
SLKTLLSL

SEQ ID NO: 44994 - protein, 8 aa, Homo sapiens
YEWDAGDV

SEQ ID NO: 44995 - protein, 8 aa, Homo sapiens
YLNRHLHT

SEQ ID NO: 44996 - protein, 8 aa, Homo sapiens
VMKYIHYK

SEQ ID NO: 44997 - protein, 8 aa, Homo sapiens
IVMKYIHY

SEQ ID NO: 44998 - protein, 8 aa, Homo sapiens
HLTPFTAR

SEQ ID NO: 44999 - protein, 8 aa, Homo sapiens
ELYGPSMR

SEQ ID NO: 45000 - protein, 8 aa, Homo sapiens
VMKYIHYK

SEQ ID NO: 45001 - protein, 8 aa, Homo sapiens
TVVEELFR

SEQ ID NO: 45002 - protein, 8 aa, Homo sapiens
IVMKYIHY

SEQ ID NO: 45003 - protein, 8 aa, Homo sapiens
NWGRIVAF

SEQ ID NO: 45004 - protein, 8 aa, Homo sapiens
RIVAFFEF

SEQ ID NO: 45005 - protein, 8 aa, Homo sapiens
SMRPLFDF

SEQ ID NO: 45006 - protein, 8 aa, Homo sapiens
PFTARGRF

SEQ ID NO: 45007 - protein, 8 aa, Homo sapiens
NWGRIVAF

SEQ ID NO: 45008 - protein, 8 aa, Homo sapiens
SWLSLKTL

SEQ ID NO: 45009 - protein, 8 aa, Homo sapiens
SMRPLFDF

SEQ ID NO: 45010 - protein, 8 aa, Homo sapiens
RIVAFFEF

SEQ ID NO: 45011 - protein, 8 aa, Homo sapiens
IVMKYIHY

SEQ ID NO: 45012 - protein, 8 aa, Homo sapiens
EMSSQLHL

SEQ ID NO: 45013 - protein, 8 aa, Homo sapiens
RIVAFFEF

SEQ ID NO: 45014 - protein, 8 aa, Homo sapiens
EIVMKYIH

SEQ ID NO: 45015 - protein, 8 aa, Homo sapiens
ATVVEELF

SEQ ID NO: 45016 - protein, 8 aa, Homo sapiens
IVMKYIHY

SEQ ID NO: 45017 - protein, 8 aa, Homo sapiens
ACITLGAY

SEQ ID NO: 45018 - protein, 8 aa, Homo sapiens
VMKYIHYK

SEQ ID NO: 45019 - protein, 8 aa, Homo sapiens
ASRDPVAR

SEQ ID NO: 45020 - protein, 8 aa, Homo sapiens
RGRFATVV

SEQ ID NO: 45021 - protein, 8 aa, Homo sapiens
EMSSQLHL

SEQ ID NO: 45022 - protein, 8 aa, Homo sapiens
SMRPLFDF

SEQ ID NO: 45023 - protein, 8 aa, Homo sapiens
VMKYIHYK

SEQ ID NO: 45024 - protein, 8 aa, Homo sapiens
HLTPFTAR

SEQ ID NO: 45025 - protein, 8 aa, Homo sapiens
ASRDPVAR

SEQ ID NO: 45026 - protein, 8 aa, Homo sapiens
DFSRRYRR

SEQ ID NO: 45027 - protein, 8 aa, Homo sapiens
WMTEYLNR

SEQ ID NO: 45028 - protein, 8 aa, Homo sapiens
TVVEELFR

SEQ ID NO: 45029 - protein, 8 aa, Homo sapiens
DFSRRYRR

SEQ ID NO: 45030 - protein, 8 aa, Homo sapiens
HLTPFTAR

SEQ ID NO: 45031 - protein, 8 aa, Homo sapiens
DFSWLSLK

SEQ ID NO: 45032 - protein, 8 aa, Homo sapiens
DDFSRRYR

SEQ ID NO: 45033 - protein, 8 aa, Homo sapiens
ELYGPSMR

SEQ ID NO: 45034 - protein, 8 aa, Homo sapiens
TVVEELFR

SEQ ID NO: 45035 - protein, 8 aa, Homo sapiens
VMKYIHYK

SEQ ID NO: 45036 - protein, 8 aa, Homo sapiens
TVVEELFR

SEQ ID NO: 45037 - protein, 8 aa, Homo sapiens
ELYGPSMR

SEQ ID NO: 45038 - protein, 8 aa, Homo sapiens
HLTPFTAR

SEQ ID NO: 45039 - protein, 8 aa, Homo sapiens
DFSWLSLK

SEQ ID NO: 45040 - protein, 8 aa, Homo sapiens
TPFTARGR

SEQ ID NO: 45041 - protein, 8 aa, Homo sapiens
TPHPAASR

SEQ ID NO: 45042 - protein, 8 aa, Homo sapiens
DDFSRRYR

SEQ ID NO: 45043 - protein, 8 aa, Homo sapiens
VMKYIHYK

SEQ ID NO: 45044 - protein, 8 aa, Homo sapiens
QAGDDFSR

SEQ ID NO: 45045 - protein, 8 aa, Homo sapiens
WMTEYLNR

SEQ ID NO: 45046 - protein, 8 aa, Homo sapiens
MCVESVNR

SEQ ID NO: 45047 - protein, 8 aa, Homo sapiens
DFSRRYRR

SEQ ID NO: 45048 - protein, 8 aa, Homo sapiens
PVVHLTLR

SEQ ID NO: 45049 - protein, 8 aa, Homo sapiens
GVMCVESV

SEQ ID NO: 45050 - protein, 8 aa, Homo sapiens
MSPLVDNI

SEQ ID NO: 45051 - protein, 8 aa, Homo sapiens
FTARGRFA

SEQ ID NO: 45052 - protein, 8 aa, Homo sapiens
FATVVEEL

SEQ ID NO: 45053 - protein, 8 aa, Homo sapiens
QTPAAPGA

SEQ ID NO: 45054 - protein, 8 aa, Homo sapiens
TLLSLALV

SEQ ID NO: 45055 - protein, 8 aa, Homo sapiens
FTARGRFA

SEQ ID NO: 45056 - protein, 8 aa, Homo sapiens
EMSSQLHL

SEQ ID NO: 45057 - protein, 8 aa, Homo sapiens
ALSPVPPV

SEQ ID NO: 45058 - protein, 8 aa, Homo sapiens
GPSMRPLF

SEQ ID NO: 45059 - protein, 8 aa, Homo sapiens
TPAAPGAA

SEQ ID NO: 45060 - protein, 8 aa, Homo sapiens
SPLQTPAA

SEQ ID NO: 45061 - protein, 8 aa, Homo sapiens
PPVVHLTL

SEQ ID NO: 45062 - protein, 8 aa, Homo sapiens
RPLFDFSW

SEQ ID NO: 45063 - protein, 8 aa, Homo sapiens
SQLHLTPF

SEQ ID NO: 45064 - protein, 8 aa, Homo sapiens
SMRPLFDF

SEQ ID NO: 45065 - protein, 8 aa, Homo sapiens
IVMKYIHY

SEQ ID NO: 45066 - protein, 8 aa, Homo sapiens
RIVAFFEF

SEQ ID NO: 45067 - protein, 8 aa, Homo sapiens
VELYGPSM

SEQ ID NO: 45068 - protein, 8 aa, Homo sapiens
TEYLNRHL

SEQ ID NO: 45069 - protein, 8 aa, Homo sapiens
IALWMTEY

SEQ ID NO: 45070 - protein, 8 aa, Homo sapiens
SQLHLTPF

SEQ ID NO: 45071 - protein, 8 aa, Homo sapiens
FEFGGVMC

SEQ ID NO: 45072 - protein, 8 aa, Homo sapiens
IALWMTEY

SEQ ID NO: 45073 - protein, 8 aa, Homo sapiens
FFEFGGVM

SEQ ID NO: 45074 - protein, 8 aa, Homo sapiens
SPLQTPAA

SEQ ID NO: 45075 - protein, 8 aa, Homo sapiens
FAEMSSQL

SEQ ID NO: 45076 - protein, 8 aa, Homo sapiens
SPVPPVVH

SEQ ID NO: 45077 - protein, 8 aa, Homo sapiens
TPAAPGAA

SEQ ID NO: 45078 - protein, 8 aa, Homo sapiens
FATVVEEL

SEQ ID NO: 45079 - protein, 8 aa, Homo sapiens
TEYLNRHL

SEQ ID NO: 45080 - protein, 8 aa, Homo sapiens
REIVMKYI

SEQ ID NO: 45081 - protein, 8 aa, Homo sapiens
FEFGGVMC

SEQ ID NO: 45082 - protein, 8 aa, Homo sapiens
REIVMKYI

SEQ ID NO: 45083 - protein, 8 aa, Homo sapiens
AEMSSQLH

SEQ ID NO: 45084 - protein, 8 aa, Homo sapiens
EELFRDGV

SEQ ID NO: 45085 - protein, 8 aa, Homo sapiens
REIVMKYI

SEQ ID NO: 45086 - protein, 8 aa, Homo sapiens
LALVGACI

SEQ ID NO: 45087 - protein, 8 aa, Homo sapiens
PPVVHLTL

SEQ ID NO: 45088 - protein, 8 aa, Homo sapiens
RPLFDFSW

SEQ ID NO: 45089 - protein, 8 aa, Homo sapiens
GPSMRPLF

SEQ ID NO: 45090 - protein, 8 aa, Homo sapiens
TPAAPGAA

SEQ ID NO: 45091 - protein, 8 aa, Homo sapiens
SPLQTPAA

SEQ ID NO: 45092 - protein, 8 aa, Homo sapiens
APPGAAPA

SEQ ID NO: 45093 - protein, 8 aa, Homo sapiens
SPLVDNIA

SEQ ID NO: 45094 - protein, 8 aa, Homo sapiens
VPPVVHLT

SEQ ID NO: 45095 - protein, 8 aa, Homo sapiens
LSQRGYEW

SEQ ID NO: 45096 - protein, 8 aa, Homo sapiens
RIVAFFEF

SEQ ID NO: 45097 - protein, 8 aa, Homo sapiens
LVDNIALW

SEQ ID NO: 45098 - protein, 8 aa, Homo sapiens
IALWMTEY

SEQ ID NO: 45099 - protein, 9 aa, Homo sapiens
NIALWMTEY

SEQ ID NO: 45100 - protein, 9 aa, Homo sapiens
ALSPVPPVV

SEQ ID NO: 45101 - protein, 9 aa, Homo sapiens
ALVGACITL

SEQ ID NO: 45102 - protein, 9 aa, Homo sapiens
KTLLSLALV

SEQ ID NO: 45103 - protein, 9 aa, Homo sapiens
LLSLALVGA

SEQ ID NO: 45104 - protein, 9 aa, Homo sapiens
IALWMTEYL

SEQ ID NO: 45105 - protein, 9 aa, Homo sapiens
LLSLALVGA

SEQ ID NO: 45106 - protein, 9 aa, Homo sapiens
VMKYIHYKL

SEQ ID NO: 45107 - protein, 9 aa, Homo sapiens
ALVGACITL

SEQ ID NO: 45108 - protein, 9 aa, Homo sapiens
SLKTLLSLA

SEQ ID NO: 45109 - protein, 9 aa, Homo sapiens
SVNREMSPL

SEQ ID NO: 45110 - protein, 9 aa, Homo sapiens
AAGPALSPV

SEQ ID NO: 45111 - protein, 9 aa, Homo sapiens
ALSPVPPVV

SEQ ID NO: 45112 - protein, 9 aa, Homo sapiens
EMSPLVDNI

SEQ ID NO: 45113 - protein, 9 aa, Homo sapiens
SLALVGACI

SEQ ID NO: 45114 - protein, 9 aa, Homo sapiens
RTSPLQTPA

SEQ ID NO: 45115 - protein, 9 aa, Homo sapiens
SMRPLFDFS

SEQ ID NO: 45116 - protein, 9 aa, Homo sapiens
YLNRHLHTW

SEQ ID NO: 45117 - protein, 9 aa, Homo sapiens
IALWMTEYL

SEQ ID NO: 45118 - protein, 9 aa, Homo sapiens
KTLLSLALV

SEQ ID NO: 45119 - protein, 9 aa, Homo sapiens
EMSSQLHLT

SEQ ID NO: 45120 - protein, 9 aa, Homo sapiens
SLKTLLSLA

SEQ ID NO: 45121 - protein, 9 aa, Homo sapiens
ALSPVPPVV

SEQ ID NO: 45122 - protein, 9 aa, Homo sapiens
LLSLALVGA

SEQ ID NO: 45123 - protein, 9 aa, Homo sapiens
AAGPALSPV

SEQ ID NO: 45124 - protein, 9 aa, Homo sapiens
SVNREMSPL

SEQ ID NO: 45125 - protein, 9 aa, Homo sapiens
TARGRFATV

SEQ ID NO: 45126 - protein, 9 aa, Homo sapiens
VMKYIHYKL

SEQ ID NO: 45127 - protein, 9 aa, Homo sapiens
ALVGACITL

SEQ ID NO: 45128 - protein, 9 aa, Homo sapiens
SLALVGACI

SEQ ID NO: 45129 - protein, 9 aa, Homo sapiens
KTLLSLALV

SEQ ID NO: 45130 - protein, 9 aa, Homo sapiens
RTSPLQTPA

SEQ ID NO: 45131 - protein, 9 aa, Homo sapiens
VAFFEFGGV

SEQ ID NO: 45132 - protein, 9 aa, Homo sapiens
EMSPLVDNI

SEQ ID NO: 45133 - protein, 9 aa, Homo sapiens
QLHLTPFTA

SEQ ID NO: 45134 - protein, 9 aa, Homo sapiens
SMRPLFDFS

SEQ ID NO: 45135 - protein, 9 aa, Homo sapiens
YLNRHLHTW

SEQ ID NO: 45136 - protein, 9 aa, Homo sapiens
ALSPVPPVV

SEQ ID NO: 45137 - protein, 9 aa, Homo sapiens
ALVGACITL

SEQ ID NO: 45138 - protein, 9 aa, Homo sapiens
AAGPALSPV

SEQ ID NO: 45139 - protein, 9 aa, Homo sapiens
KTLLSLALV

SEQ ID NO: 45140 - protein, 9 aa, Homo sapiens
AAGPALSPV

SEQ ID NO: 45141 - protein, 9 aa, Homo sapiens
SQLHLTPFT

SEQ ID NO: 45142 - protein, 9 aa, Homo sapiens
LQTPAAPGA

SEQ ID NO: 45143 - protein, 9 aa, Homo sapiens
FEFGGVMCV

SEQ ID NO: 45144 - protein, 9 aa, Homo sapiens
ALVGACITL

SEQ ID NO: 45145 - protein, 9 aa, Homo sapiens
LLSLALVGA

SEQ ID NO: 45146 - protein, 9 aa, Homo sapiens
ALSPVPPVV

SEQ ID NO: 45147 - protein, 9 aa, Homo sapiens
FTARGRFAT

SEQ ID NO: 45148 - protein, 9 aa, Homo sapiens
IQDNGGWDA

SEQ ID NO: 45149 - protein, 9 aa, Homo sapiens
IALWMTEYL

SEQ ID NO: 45150 - protein, 9 aa, Homo sapiens
AAPPGAAPA

SEQ ID NO: 45151 - protein, 9 aa, Homo sapiens
TARGRFATV

SEQ ID NO: 45152 - protein, 9 aa, Homo sapiens
VAFFEFGGV

SEQ ID NO: 45153 - protein, 9 aa, Homo sapiens
RTSPLQTPA

SEQ ID NO: 45154 - protein, 9 aa, Homo sapiens
ALSPVPPVV

SEQ ID NO: 45155 - protein, 9 aa, Homo sapiens
ALVGACITL

SEQ ID NO: 45156 - protein, 9 aa, Homo sapiens
PLFDFSWLS

SEQ ID NO: 45157 - protein, 9 aa, Homo sapiens
FEFGGVMCV

SEQ ID NO: 45158 - protein, 9 aa, Homo sapiens
YLNRHLHTW

SEQ ID NO: 45159 - protein, 9 aa, Homo sapiens
SLALVGACI

SEQ ID NO: 45160 - protein, 9 aa, Homo sapiens
LLSLALVGA

SEQ ID NO: 45161 - protein, 9 aa, Homo sapiens
EMSPLVDNI

SEQ ID NO: 45162 - protein, 9 aa, Homo sapiens
QLHLTPFTA

SEQ ID NO: 45163 - protein, 9 aa, Homo sapiens
SLKTLLSLA

SEQ ID NO: 45164 - protein, 9 aa, Homo sapiens
LVDNIALWM

SEQ ID NO: 45165 - protein, 9 aa, Homo sapiens
KTLLSLALV

SEQ ID NO: 45166 - protein, 9 aa, Homo sapiens
GVNWGRIVA

SEQ ID NO: 45167 - protein, 9 aa, Homo sapiens
VMKYIHYKL

SEQ ID NO: 45168 - protein, 9 aa, Homo sapiens
AAGPALSPV

SEQ ID NO: 45169 - protein, 9 aa, Homo sapiens
EMSSQLHLT

SEQ ID NO: 45170 - protein, 9 aa, Homo sapiens
TGYDNREIV

SEQ ID NO: 45171 - protein, 9 aa, Homo sapiens
HLTPFTARG

SEQ ID NO: 45172 - protein, 9 aa, Homo sapiens
ELYGPSMRP

SEQ ID NO: 45173 - protein, 9 aa, Homo sapiens
GGWDAFVEL

SEQ ID NO: 45174 - protein, 9 aa, Homo sapiens
IALWMTEYL

SEQ ID NO: 45175 - protein, 9 aa, Homo sapiens
ALWMTEYLN

SEQ ID NO: 45176 - protein, 9 aa, Homo sapiens
AAPPGAAPA

SEQ ID NO: 45177 - protein, 9 aa, Homo sapiens
ALSPVPPVV

SEQ ID NO: 45178 - protein, 9 aa, Homo sapiens
ALVGACITL

SEQ ID NO: 45179 - protein, 9 aa, Homo sapiens
YLNRHLHTW

SEQ ID NO: 45180 - protein, 9 aa, Homo sapiens
FEFGGVMCV

SEQ ID NO: 45181 - protein, 9 aa, Homo sapiens
PLFDFSWLS

SEQ ID NO: 45182 - protein, 9 aa, Homo sapiens
VMKYIHYKL

SEQ ID NO: 45183 - protein, 9 aa, Homo sapiens
LLSLALVGA

SEQ ID NO: 45184 - protein, 9 aa, Homo sapiens
SLALVGACI

SEQ ID NO: 45185 - protein, 9 aa, Homo sapiens
EMSPLVDNI

SEQ ID NO: 45186 - protein, 9 aa, Homo sapiens
QLHLTPFTA

SEQ ID NO: 45187 - protein, 9 aa, Homo sapiens
FTARGRFAT

SEQ ID NO: 45188 - protein, 9 aa, Homo sapiens
ALSPVPPVV

SEQ ID NO: 45189 - protein, 9 aa, Homo sapiens
ALVGACITL

SEQ ID NO: 45190 - protein, 9 aa, Homo sapiens
AAGPALSPV

SEQ ID NO: 45191 - protein, 9 aa, Homo sapiens
FEFGGVMCV

SEQ ID NO: 45192 - protein, 9 aa, Homo sapiens
SLALVGACI

SEQ ID NO: 45193 - protein, 9 aa, Homo sapiens
VMKYIHYKL

SEQ ID NO: 45194 - protein, 9 aa, Homo sapiens
PLFDFSWLS

SEQ ID NO: 45195 - protein, 9 aa, Homo sapiens
QLHLTPFTA

SEQ ID NO: 45196 - protein, 9 aa, Homo sapiens
SLKTLLSLA

SEQ ID NO: 45197 - protein, 9 aa, Homo sapiens
YLNRHLHTW

SEQ ID NO: 45198 - protein, 9 aa, Homo sapiens
TARGRFATV

SEQ ID NO: 45199 - protein, 9 aa, Homo sapiens
ALSPVPPVV

SEQ ID NO: 45200 - protein, 9 aa, Homo sapiens
FEFGGVMCV

SEQ ID NO: 45201 - protein, 9 aa, Homo sapiens
ALVGACITL

SEQ ID NO: 45202 - protein, 9 aa, Homo sapiens
AAGPALSPV

SEQ ID NO: 45203 - protein, 9 aa, Homo sapiens
LLSLALVGA

SEQ ID NO: 45204 - protein, 9 aa, Homo sapiens
PALSPVPPV

SEQ ID NO: 45205 - protein, 9 aa, Homo sapiens
EMSPLVDNI

SEQ ID NO: 45206 - protein, 9 aa, Homo sapiens
EMSSQLHLT

SEQ ID NO: 45207 - protein, 9 aa, Homo sapiens
YLNRHLHTW

SEQ ID NO: 45208 - protein, 9 aa, Homo sapiens
IVMKYIHYK

SEQ ID NO: 45209 - protein, 9 aa, Homo sapiens
TLGAYLGHK

SEQ ID NO: 45210 - protein, 9 aa, Homo sapiens
FDFSWLSLK

SEQ ID NO: 45211 - protein, 9 aa, Homo sapiens
IVMKYIHYK

SEQ ID NO: 45212 - protein, 9 aa, Homo sapiens
TLGAYLGHK

SEQ ID NO: 45213 - protein, 9 aa, Homo sapiens
ATVVEELFR

SEQ ID NO: 45214 - protein, 9 aa, Homo sapiens
NWGRIVAFF

SEQ ID NO: 45215 - protein, 9 aa, Homo sapiens
PSMRPLFDF

SEQ ID NO: 45216 - protein, 9 aa, Homo sapiens
GRIVAFFEF

SEQ ID NO: 45217 - protein, 9 aa, Homo sapiens
IVMKYIHYK

SEQ ID NO: 45218 - protein, 9 aa, Homo sapiens
RYRRDFAEM

SEQ ID NO: 45219 - protein, 9 aa, Homo sapiens
RFATVVEEL

SEQ ID NO: 45220 - protein, 9 aa, Homo sapiens
NWGRIVAFF

SEQ ID NO: 45221 - protein, 9 aa, Homo sapiens
RFATVVEEL

SEQ ID NO: 45222 - protein, 9 aa, Homo sapiens
SWLSLKTLL

SEQ ID NO: 45223 - protein, 9 aa, Homo sapiens
RYRRDFAEM

SEQ ID NO: 45224 - protein, 9 aa, Homo sapiens
RFATVVEEL

SEQ ID NO: 45225 - protein, 9 aa, Homo sapiens
LYGPSMRPL

SEQ ID NO: 45226 - protein, 9 aa, Homo sapiens
EIVMKYIHY

SEQ ID NO: 45227 - protein, 9 aa, Homo sapiens
NIALWMTEY

SEQ ID NO: 45228 - protein, 9 aa, Homo sapiens
EIVMKYIHY

SEQ ID NO: 45229 - protein, 9 aa, Homo sapiens
NIALWMTEY

SEQ ID NO: 45230 - protein, 9 aa, Homo sapiens
SVNREMSPL

SEQ ID NO: 45231 - protein, 9 aa, Homo sapiens
YLNRHLHTW

SEQ ID NO: 45232 - protein, 9 aa, Homo sapiens
FVELYGPSM

SEQ ID NO: 45233 - protein, 9 aa, Homo sapiens
LVDNIALWM

SEQ ID NO: 45234 - protein, 9 aa, Homo sapiens
NIALWMTEY

SEQ ID NO: 45235 - protein, 9 aa, Homo sapiens
EIVMKYIHY

SEQ ID NO: 45236 - protein, 9 aa, Homo sapiens
IVMKYIHYK

SEQ ID NO: 45237 - protein, 9 aa, Homo sapiens
MAHAGRTGY

SEQ ID NO: 45238 - protein, 9 aa, Homo sapiens
TLGAYLGHK

SEQ ID NO: 45239 - protein, 9 aa, Homo sapiens
NIALWMTEY

SEQ ID NO: 45240 - protein, 9 aa, Homo sapiens
IVMKYIHYK

SEQ ID NO: 45241 - protein, 9 aa, Homo sapiens
YIHYKLSQR

SEQ ID NO: 45242 - protein, 9 aa, Homo sapiens
VMCVESVNR

SEQ ID NO: 45243 - protein, 9 aa, Homo sapiens
RQAGDDFSR

SEQ ID NO: 45244 - protein, 9 aa, Homo sapiens
VMKYIHYKL

SEQ ID NO: 45245 - protein, 9 aa, Homo sapiens
ATVVEELFR

SEQ ID NO: 45246 - protein, 9 aa, Homo sapiens
DDFSRRYRR

SEQ ID NO: 45247 - protein, 9 aa, Homo sapiens
YIHYKLSQR

SEQ ID NO: 45248 - protein, 9 aa, Homo sapiens
HTPHPAASR

SEQ ID NO: 45249 - protein, 9 aa, Homo sapiens
IVMKYIHYK

SEQ ID NO: 45250 - protein, 9 aa, Homo sapiens
IVMKYIHYK

SEQ ID NO: 45251 - protein, 9 aa, Homo sapiens
YIHYKLSQR

SEQ ID NO: 45252 - protein, 9 aa, Homo sapiens
HTPHPAASR

SEQ ID NO: 45253 - protein, 9 aa, Homo sapiens
LTPFTARGR

SEQ ID NO: 45254 - protein, 9 aa, Homo sapiens
ATVVEELFR

SEQ ID NO: 45255 - protein, 9 aa, Homo sapiens
DDFSRRYRR

SEQ ID NO: 45256 - protein, 9 aa, Homo sapiens
FDFSWLSLK

SEQ ID NO: 45257 - protein, 9 aa, Homo sapiens
QAGDDFSRR

SEQ ID NO: 45258 - protein, 9 aa, Homo sapiens
NIALWMTEY

SEQ ID NO: 45259 - protein, 9 aa, Homo sapiens
TLGAYLGHK

SEQ ID NO: 45260 - protein, 9 aa, Homo sapiens
MAHAGRTGY

SEQ ID NO: 45261 - protein, 9 aa, Homo sapiens
FTARGRFAT

SEQ ID NO: 45262 - protein, 9 aa, Homo sapiens
VAFFEFGGV

SEQ ID NO: 45263 - protein, 9 aa, Homo sapiens
HPAASRDPV

SEQ ID NO: 45264 - protein, 9 aa, Homo sapiens
QTPAAPGAA

SEQ ID NO: 45265 - protein, 9 aa, Homo sapiens
SVNREMSPL

SEQ ID NO: 45266 - protein, 9 aa, Homo sapiens
TARGRFATV

SEQ ID NO: 45267 - protein, 9 aa, Homo sapiens
TGYDNREIV

SEQ ID NO: 45268 - protein, 9 aa, Homo sapiens
EMSPLVDNI

SEQ ID NO: 45269 - protein, 9 aa, Homo sapiens
RTSPLQTPA

SEQ ID NO: 45270 - protein, 9 aa, Homo sapiens
VGACITLGA

SEQ ID NO: 45271 - protein, 9 aa, Homo sapiens
MSPLVDNIA

SEQ ID NO: 45272 - protein, 9 aa, Homo sapiens
FEFGGVMCV

SEQ ID NO: 45273 - protein, 9 aa, Homo sapiens
PALSPVPPV

SEQ ID NO: 45274 - protein, 9 aa, Homo sapiens
DVGAAPPGA

SEQ ID NO: 45275 - protein, 9 aa, Homo sapiens
HPAASRDPV

SEQ ID NO: 45276 - protein, 9 aa, Homo sapiens
EMSPLVDNI

SEQ ID NO: 45277 - protein, 9 aa, Homo sapiens
FTARGRFAT

SEQ ID NO: 45278 - protein, 9 aa, Homo sapiens
KTLLSLALV

SEQ ID NO: 45279 - protein, 9 aa, Homo sapiens
TPAAPGAAA

SEQ ID NO: 45280 - protein, 9 aa, Homo sapiens
IALWMTEYL

SEQ ID NO: 45281 - protein, 9 aa, Homo sapiens
HPAASRDPV

SEQ ID NO: 45282 - protein, 9 aa, Homo sapiens
DPVARTSPL

SEQ ID NO: 45283 - protein, 9 aa, Homo sapiens
SPLVDNIAL

SEQ ID NO: 45284 - protein, 9 aa, Homo sapiens
TPAAPGAAA

SEQ ID NO: 45285 - protein, 9 aa, Homo sapiens
RPLFDFSWL

SEQ ID NO: 45286 - protein, 9 aa, Homo sapiens
SPVPPVVHL

SEQ ID NO: 45287 - protein, 9 aa, Homo sapiens
APGAAAGPA

SEQ ID NO: 45288 - protein, 9 aa, Homo sapiens
VPPVVHLTL

SEQ ID NO: 45289 - protein, 9 aa, Homo sapiens
TPFTARGRF

SEQ ID NO: 45290 - protein, 9 aa, Homo sapiens
TARGRFATV

SEQ ID NO: 45291 - protein, 9 aa, Homo sapiens
MAHAGRTGY

SEQ ID NO: 45292 - protein, 9 aa, Homo sapiens
SSQLHLTPF

SEQ ID NO: 45293 - protein, 9 aa, Homo sapiens
FEFGGVMCV

SEQ ID NO: 45294 - protein, 9 aa, Homo sapiens
DNREIVMKY

SEQ ID NO: 45295 - protein, 9 aa, Homo sapiens
IALWMTEYL

SEQ ID NO: 45296 - protein, 9 aa, Homo sapiens
GRIVAFFEF

SEQ ID NO: 45297 - protein, 9 aa, Homo sapiens
RRYRRDFAE

SEQ ID NO: 45298 - protein, 9 aa, Homo sapiens
SPLVDNIAL

SEQ ID NO: 45299 - protein, 9 aa, Homo sapiens
MAHAGRTGY

SEQ ID NO: 45300 - protein, 9 aa, Homo sapiens
FVELYGPSM

SEQ ID NO: 45301 - protein, 9 aa, Homo sapiens
TPFTARGRF

SEQ ID NO: 45302 - protein, 9 aa, Homo sapiens
IALWMTEYL

SEQ ID NO: 45303 - protein, 9 aa, Homo sapiens
DPVARTSPL

SEQ ID NO: 45304 - protein, 9 aa, Homo sapiens
FATVVEELF

SEQ ID NO: 45305 - protein, 9 aa, Homo sapiens
TPAAPGAAA

SEQ ID NO: 45306 - protein, 9 aa, Homo sapiens
NIALWMTEY

SEQ ID NO: 45307 - protein, 9 aa, Homo sapiens
FAEMSSQLH

SEQ ID NO: 45308 - protein, 9 aa, Homo sapiens
AEMSSQLHL

SEQ ID NO: 45309 - protein, 9 aa, Homo sapiens
FEFGGVMCV

SEQ ID NO: 45310 - protein, 9 aa, Homo sapiens
AEMSSQLHL

SEQ ID NO: 45311 - protein, 9 aa, Homo sapiens
FEFGGVMCV

SEQ ID NO: 45312 - protein, 9 aa, Homo sapiens
AEMSSQLHL

SEQ ID NO: 45313 - protein, 9 aa, Homo sapiens
AEMSSQLHL

SEQ ID NO: 45314 - protein, 9 aa, Homo sapiens
AEMSSQLHL

SEQ ID NO: 45315 - protein, 9 aa, Homo sapiens
VPPVVHLTL

SEQ ID NO: 45316 - protein, 9 aa, Homo sapiens
RPLFDFSWL

SEQ ID NO: 45317 - protein, 9 aa, Homo sapiens
SPLVDNIAL

SEQ ID NO: 45318 - protein, 9 aa, Homo sapiens
IALWMTEYL

SEQ ID NO: 45319 - protein, 9 aa, Homo sapiens
TPAAPGAAA

SEQ ID NO: 45320 - protein, 9 aa, Homo sapiens
HPAASRDPV

SEQ ID NO: 45321 - protein, 9 aa, Homo sapiens
APGAAAGPA

SEQ ID NO: 45322 - protein, 9 aa, Homo sapiens
QPGHTPHPA

SEQ ID NO: 45323 - protein, 9 aa, Homo sapiens
YLNRHLHTW

SEQ ID NO: 45324 - protein, 9 aa, Homo sapiens
KLSQRGYEW

SEQ ID NO: 45325 - protein, 9 aa, Homo sapiens
FATVVEELF

SEQ ID NO: 45326 - protein, 9 aa, Homo sapiens
GAAPAPGIF

SEQ ID NO: 45327 - protein, 10 aa, Homo sapiens
YLNRHLHTWI

SEQ ID NO: 45328 - protein, 10 aa, Homo sapiens
IVMKYIHYKL

SEQ ID NO: 45329 - protein, 10 aa, Homo sapiens
TLLSLALVGA

SEQ ID NO: 45330 - protein, 10 aa, Homo sapiens
PLFDFSWLSL

SEQ ID NO: 45331 - protein, 10 aa, Homo sapiens
WLSLKTLLSL

SEQ ID NO: 45332 - protein, 10 aa, Homo sapiens
FTARGRFATV

SEQ ID NO: 45333 - protein, 10 aa, Homo sapiens
NIALWMTEYL

SEQ ID NO: 45334 - protein, 10 aa, Homo sapiens
WMTEYLNRHL

SEQ ID NO: 45335 - protein, 10 aa, Homo sapiens
TLLSLALVGA

SEQ ID NO: 45336 - protein, 10 aa, Homo sapiens
NIALWMTEYL

SEQ ID NO: 45337 - protein, 10 aa, Homo sapiens
WLSLKTLLSL

SEQ ID NO: 45338 - protein, 10 aa, Homo sapiens
SLKTLLSLAL

SEQ ID NO: 45339 - protein, 10 aa, Homo sapiens
WMTEYLNRHL

SEQ ID NO: 45340 - protein, 10 aa, Homo sapiens
PLFDFSWLSL

SEQ ID NO: 45341 - protein, 10 aa, Homo sapiens
AAAGPALSPV

SEQ ID NO: 45342 - protein, 10 aa, Homo sapiens
IVMKYIHYKL

SEQ ID NO: 45343 - protein, 10 aa, Homo sapiens
FTARGRFATV

SEQ ID NO: 45344 - protein, 10 aa, Homo sapiens
ELYGPSMRPL

SEQ ID NO: 45345 - protein, 10 aa, Homo sapiens
YLNRHLHTWI

SEQ ID NO: 45346 - protein, 10 aa, Homo sapiens
LVGACITLGA

SEQ ID NO: 45347 - protein, 10 aa, Homo sapiens
IVAFFEFGGV

SEQ ID NO: 45348 - protein, 10 aa, Homo sapiens
YLNRHLHTWI

SEQ ID NO: 45349 - protein, 10 aa, Homo sapiens
FTARGRFATV

SEQ ID NO: 45350 - protein, 10 aa, Homo sapiens
WLSLKTLLSL

SEQ ID NO: 45351 - protein, 10 aa, Homo sapiens
SLKTLLSLAL

SEQ ID NO: 45352 - protein, 10 aa, Homo sapiens
NIALWMTEYL

SEQ ID NO: 45353 - protein, 10 aa, Homo sapiens
SVNREMSPLV

SEQ ID NO: 45354 - protein, 10 aa, Homo sapiens
IVAFFEFGGV

SEQ ID NO: 45355 - protein, 10 aa, Homo sapiens
AAAGPALSPV

SEQ ID NO: 45356 - protein, 10 aa, Homo sapiens
WMTEYLNRHL

SEQ ID NO: 45357 - protein, 10 aa, Homo sapiens
TLLSLALVGA

SEQ ID NO: 45358 - protein, 10 aa, Homo sapiens
IVMKYIHYKL

SEQ ID NO: 45359 - protein, 10 aa, Homo sapiens
LVGACITLGA

SEQ ID NO: 45360 - protein, 10 aa, Homo sapiens
ELYGPSMRPL

SEQ ID NO: 45361 - protein, 10 aa, Homo sapiens
SQPGHTPHPA

SEQ ID NO: 45362 - protein, 10 aa, Homo sapiens
LLSLALVGAC

SEQ ID NO: 45363 - protein, 10 aa, Homo sapiens
TARGRFATVV

SEQ ID NO: 45364 - protein, 10 aa, Homo sapiens
YLNRHLHTWI

SEQ ID NO: 45365 - protein, 10 aa, Homo sapiens
FTARGRFATV

SEQ ID NO: 45366 - protein, 10 aa, Homo sapiens
IVMKYIHYKL

SEQ ID NO: 45367 - protein, 10 aa, Homo sapiens
AAAGPALSPV

SEQ ID NO: 45368 - protein, 10 aa, Homo sapiens
SVNREMSPLV

SEQ ID NO: 45369 - protein, 10 aa, Homo sapiens
FTARGRFATV

SEQ ID NO: 45370 - protein, 10 aa, Homo sapiens
SQLHLTPFTA

SEQ ID NO: 45371 - protein, 10 aa, Homo sapiens
IQDNGGWDAF

SEQ ID NO: 45372 - protein, 10 aa, Homo sapiens
WLSLKTLLSL

SEQ ID NO: 45373 - protein, 10 aa, Homo sapiens
SQPGHTPHPA

SEQ ID NO: 45374 - protein, 10 aa, Homo sapiens
YLNRHLHTWI

SEQ ID NO: 45375 - protein, 10 aa, Homo sapiens
AAAGPALSPV

SEQ ID NO: 45376 - protein, 10 aa, Homo sapiens
WMTEYLNRHL

SEQ ID NO: 45377 - protein, 10 aa, Homo sapiens
SVNREMSPLV

SEQ ID NO: 45378 - protein, 10 aa, Homo sapiens
NIALWMTEYL

SEQ ID NO: 45379 - protein, 10 aa, Homo sapiens
TLLSLALVGA

SEQ ID NO: 45380 - protein, 10 aa, Homo sapiens
IVAFFEFGGV

SEQ ID NO: 45381 - protein, 10 aa, Homo sapiens
LQTPAAPGAA

SEQ ID NO: 45382 - protein, 10 aa, Homo sapiens
IVMKYIHYKL

SEQ ID NO: 45383 - protein, 10 aa, Homo sapiens
YEWDAGDVGA

SEQ ID NO: 45384 - protein, 10 aa, Homo sapiens
PLFDFSWLSL

SEQ ID NO: 45385 - protein, 10 aa, Homo sapiens
RTSPLQTPAA

SEQ ID NO: 45386 - protein, 10 aa, Homo sapiens
LVGACITLGA

SEQ ID NO: 45387 - protein, 10 aa, Homo sapiens
PLFDFSWLSL

SEQ ID NO: 45388 - protein, 10 aa, Homo sapiens
YLNRHLHTWI

SEQ ID NO: 45389 - protein, 10 aa, Homo sapiens
ELYGPSMRPL

SEQ ID NO: 45390 - protein, 10 aa, Homo sapiens
WLSLKTLLSL

SEQ ID NO: 45391 - protein, 10 aa, Homo sapiens
TLLSLALVGA

SEQ ID NO: 45392 - protein, 10 aa, Homo sapiens
FTARGRFATV

SEQ ID NO: 45393 - protein, 10 aa, Homo sapiens
PLVDNIALWM

SEQ ID NO: 45394 - protein, 10 aa, Homo sapiens
SLKTLLSLAL

SEQ ID NO: 45395 - protein, 10 aa, Homo sapiens
WMTEYLNRHL

SEQ ID NO: 45396 - protein, 10 aa, Homo sapiens
SVNREMSPLV

SEQ ID NO: 45397 - protein, 10 aa, Homo sapiens
PVPPVVHLTL

SEQ ID NO: 45398 - protein, 10 aa, Homo sapiens
AAAGPALSPV

SEQ ID NO: 45399 - protein, 10 aa, Homo sapiens
IVMKYIHYKL

SEQ ID NO: 45400 - protein, 10 aa, Homo sapiens
IVAFFEFGGV

SEQ ID NO: 45401 - protein, 10 aa, Homo sapiens
VVEELFRDGV

SEQ ID NO: 45402 - protein, 10 aa, Homo sapiens
NIALWMTEYL

SEQ ID NO: 45403 - protein, 10 aa, Homo sapiens
EMSPLVDNIA

SEQ ID NO: 45404 - protein, 10 aa, Homo sapiens
LVDNIALWMT

SEQ ID NO: 45405 - protein, 10 aa, Homo sapiens
FFEFGGVMCV

SEQ ID NO: 45406 - protein, 10 aa, Homo sapiens
SLALVGACIT

SEQ ID NO: 45407 - protein, 10 aa, Homo sapiens
WIQDNGGWDA

SEQ ID NO: 45408 - protein, 10 aa, Homo sapiens
YLNRHLHTWI

SEQ ID NO: 45409 - protein, 10 aa, Homo sapiens
PLFDFSWLSL

SEQ ID NO: 45410 - protein, 10 aa, Homo sapiens
FTARGRFATV

SEQ ID NO: 45411 - protein, 10 aa, Homo sapiens
SLKTLLSLAL

SEQ ID NO: 45412 - protein, 10 aa, Homo sapiens
ELYGPSMRPL

SEQ ID NO: 45413 - protein, 10 aa, Homo sapiens
WMTEYLNRHL

SEQ ID NO: 45414 - protein, 10 aa, Homo sapiens
WLSLKTLLSL

SEQ ID NO: 45415 - protein, 10 aa, Homo sapiens
TLLSLALVGA

SEQ ID NO: 45416 - protein, 10 aa, Homo sapiens
VVEELFRDGV

SEQ ID NO: 45417 - protein, 10 aa, Homo sapiens
PLVDNIALWM

SEQ ID NO: 45418 - protein, 10 aa, Homo sapiens
IVMKYIHYKL

SEQ ID NO: 45419 - protein, 10 aa, Homo sapiens
SVNREMSPLV

SEQ ID NO: 45420 - protein, 10 aa, Homo sapiens
WIQDNGGWDA

SEQ ID NO: 45421 - protein, 10 aa, Homo sapiens
IVAFFEFGGV

SEQ ID NO: 45422 - protein, 10 aa, Homo sapiens
PVPPVVHLTL

SEQ ID NO: 45423 - protein, 10 aa, Homo sapiens
YEWDAGDVGA

SEQ ID NO: 45424 - protein, 10 aa, Homo sapiens
YLNRHLHTWI

SEQ ID NO: 45425 - protein, 10 aa, Homo sapiens
PLFDFSWLSL

SEQ ID NO: 45426 - protein, 10 aa, Homo sapiens
FTARGRFATV

SEQ ID NO: 45427 - protein, 10 aa, Homo sapiens
ELYGPSMRPL

SEQ ID NO: 45428 - protein, 10 aa, Homo sapiens
WLSLKTLLSL

SEQ ID NO: 45429 - protein, 10 aa, Homo sapiens
PLVDNIALWM

SEQ ID NO: 45430 - protein, 10 aa, Homo sapiens
SVNREMSPLV

SEQ ID NO: 45431 - protein, 10 aa, Homo sapiens
IVMKYIHYKL

SEQ ID NO: 45432 - protein, 10 aa, Homo sapiens
WMTEYLNRHL

SEQ ID NO: 45433 - protein, 10 aa, Homo sapiens
AAAGPALSPV

SEQ ID NO: 45434 - protein, 10 aa, Homo sapiens
PVPPVVHLTL

SEQ ID NO: 45435 - protein, 10 aa, Homo sapiens
SLKTLLSLAL

SEQ ID NO: 45436 - protein, 10 aa, Homo sapiens
TLLSLALVGA

SEQ ID NO: 45437 - protein, 10 aa, Homo sapiens
NIALWMTEYL

SEQ ID NO: 45438 - protein, 10 aa, Homo sapiens
SLALVGACIT

SEQ ID NO: 45439 - protein, 10 aa, Homo sapiens
IVAFFEFGGV

SEQ ID NO: 45440 - protein, 10 aa, Homo sapiens
PLFDFSWLSL

SEQ ID NO: 45441 - protein, 10 aa, Homo sapiens
YLNRHLHTWI

SEQ ID NO: 45442 - protein, 10 aa, Homo sapiens
WLSLKTLLSL

SEQ ID NO: 45443 - protein, 10 aa, Homo sapiens
FTARGRFATV

SEQ ID NO: 45444 - protein, 10 aa, Homo sapiens
ELYGPSMRPL

SEQ ID NO: 45445 - protein, 10 aa, Homo sapiens
PLVDNIALWM

SEQ ID NO: 45446 - protein, 10 aa, Homo sapiens
AAAGPALSPV

SEQ ID NO: 45447 - protein, 10 aa, Homo sapiens
TLLSLALVGA

SEQ ID NO: 45448 - protein, 10 aa, Homo sapiens
WMTEYLNRHL

SEQ ID NO: 45449 - protein, 10 aa, Homo sapiens
PALSPVPPVV

SEQ ID NO: 45450 - protein, 10 aa, Homo sapiens
IVMKYIHYKL

SEQ ID NO: 45451 - protein, 10 aa, Homo sapiens
NIALWMTEYL

SEQ ID NO: 45452 - protein, 10 aa, Homo sapiens
ITLGAYLGHK

SEQ ID NO: 45453 - protein, 10 aa, Homo sapiens
LFDFSWLSLK

SEQ ID NO: 45454 - protein, 10 aa, Homo sapiens
EIVMKYIHYK

SEQ ID NO: 45455 - protein, 10 aa, Homo sapiens
GVMCVESVNR

SEQ ID NO: 45456 - protein, 10 aa, Homo sapiens
ALWMTEYLNR

SEQ ID NO: 45457 - protein, 10 aa, Homo sapiens
ITLGAYLGHK

SEQ ID NO: 45458 - protein, 10 aa, Homo sapiens
GVMCVESVNR

SEQ ID NO: 45459 - protein, 10 aa, Homo sapiens
EIVMKYIHYK

SEQ ID NO: 45460 - protein, 10 aa, Homo sapiens
ALWMTEYLNR

SEQ ID NO: 45461 - protein, 10 aa, Homo sapiens
LFDFSWLSLK

SEQ ID NO: 45462 - protein, 10 aa, Homo sapiens
EYLNRHLHTW

SEQ ID NO: 45463 - protein, 10 aa, Homo sapiens
LYGPSMRPLF

SEQ ID NO: 45464 - protein, 10 aa, Homo sapiens
RFATVVEELF

SEQ ID NO: 45465 - protein, 10 aa, Homo sapiens
GYDNREIVMK

SEQ ID NO: 45466 - protein, 10 aa, Homo sapiens
DFSRRYRRDF

SEQ ID NO: 45467 - protein, 10 aa, Homo sapiens
IVMKYIHYKL

SEQ ID NO: 45468 - protein, 10 aa, Homo sapiens
LTLRQAGDDF

SEQ ID NO: 45469 - protein, 10 aa, Homo sapiens
RFATVVEELF

SEQ ID NO: 45470 - protein, 10 aa, Homo sapiens
LYGPSMRPLF

SEQ ID NO: 45471 - protein, 10 aa, Homo sapiens
EYLNRHLHTW

SEQ ID NO: 45472 - protein, 10 aa, Homo sapiens
EYLNRHLHTW

SEQ ID NO: 45473 - protein, 10 aa, Homo sapiens
RFATVVEELF

SEQ ID NO: 45474 - protein, 10 aa, Homo sapiens
LYGPSMRPLF

SEQ ID NO: 45475 - protein, 10 aa, Homo sapiens
DNIALWMTEY

SEQ ID NO: 45476 - protein, 10 aa, Homo sapiens
ESVNREMSPL

SEQ ID NO: 45477 - protein, 10 aa, Homo sapiens
ELYGPSMRPL

SEQ ID NO: 45478 - protein, 10 aa, Homo sapiens
NIALWMTEYL

SEQ ID NO: 45479 - protein, 10 aa, Homo sapiens
DNIALWMTEY

SEQ ID NO: 45480 - protein, 10 aa, Homo sapiens
ITLGAYLGHK

SEQ ID NO: 45481 - protein, 10 aa, Homo sapiens
KYIHYKLSQR

SEQ ID NO: 45482 - protein, 10 aa, Homo sapiens
LFRDGVNWGR

SEQ ID NO: 45483 - protein, 10 aa, Homo sapiens
GVMCVESVNR

SEQ ID NO: 45484 - protein, 10 aa, Homo sapiens
HLTPFTARGR

SEQ ID NO: 45485 - protein, 10 aa, Homo sapiens
ALWMTEYLNR

SEQ ID NO: 45486 - protein, 10 aa, Homo sapiens
AGDDFSRRYR

SEQ ID NO: 45487 - protein, 10 aa, Homo sapiens
FATVVEELFR

SEQ ID NO: 45488 - protein, 10 aa, Homo sapiens
QLHLTPFTAR

SEQ ID NO: 45489 - protein, 10 aa, Homo sapiens
LFRDGVNWGR

SEQ ID NO: 45490 - protein, 10 aa, Homo sapiens
KYIHYKLSQR

SEQ ID NO: 45491 - protein, 10 aa, Homo sapiens
FATVVEELFR

SEQ ID NO: 45492 - protein, 10 aa, Homo sapiens
ALWMTEYLNR

SEQ ID NO: 45493 - protein, 10 aa, Homo sapiens
FATVVEELFR

SEQ ID NO: 45494 - protein, 10 aa, Homo sapiens
EIVMKYIHYK

SEQ ID NO: 45495 - protein, 10 aa, Homo sapiens
HLTPFTARGR

SEQ ID NO: 45496 - protein, 10 aa, Homo sapiens
FVELYGPSMR

SEQ ID NO: 45497 - protein, 10 aa, Homo sapiens
GVMCVESVNR

SEQ ID NO: 45498 - protein, 10 aa, Homo sapiens
ITLGAYLGHK

SEQ ID NO: 45499 - protein, 10 aa, Homo sapiens
MTEYLNRHLH

SEQ ID NO: 45500 - protein, 10 aa, Homo sapiens
QLHLTPFTAR

SEQ ID NO: 45501 - protein, 10 aa, Homo sapiens
HAGRTGYDNR

SEQ ID NO: 45502 - protein, 10 aa, Homo sapiens
FTARGRFATV

SEQ ID NO: 45503 - protein, 10 aa, Homo sapiens
IVAFFEFGGV

SEQ ID NO: 45504 - protein, 10 aa, Homo sapiens
NIALWMTEYL

SEQ ID NO: 45505 - protein, 10 aa, Homo sapiens
IVMKYIHYKL

SEQ ID NO: 45506 - protein, 10 aa, Homo sapiens
AAAGPALSPV

SEQ ID NO: 45507 - protein, 10 aa, Homo sapiens
QTPAAPGAAA

SEQ ID NO: 45508 - protein, 10 aa, Homo sapiens
MSPLVDNIAL

SEQ ID NO: 45509 - protein, 10 aa, Homo sapiens
ELYGPSMRPL

SEQ ID NO: 45510 - protein, 10 aa, Homo sapiens
ESVNREMSPL

SEQ ID NO: 45511 - protein, 10 aa, Homo sapiens
MRPLFDFSWL

SEQ ID NO: 45512 - protein, 10 aa, Homo sapiens
SVNREMSPLV

SEQ ID NO: 45513 - protein, 10 aa, Homo sapiens
TARGRFATVV

SEQ ID NO: 45514 - protein, 10 aa, Homo sapiens
FTARGRFATV

SEQ ID NO: 45515 - protein, 10 aa, Homo sapiens
ELYGPSMRPL

SEQ ID NO: 45516 - protein, 10 aa, Homo sapiens
PALSPVPPVV

SEQ ID NO: 45517 - protein, 10 aa, Homo sapiens
NIALWMTEYL

SEQ ID NO: 45518 - protein, 10 aa, Homo sapiens
SVNREMSPLV

SEQ ID NO: 45519 - protein, 10 aa, Homo sapiens
AAAGPALSPV

SEQ ID NO: 45520 - protein, 10 aa, Homo sapiens
DVGAAPPGAA

SEQ ID NO: 45521 - protein, 10 aa, Homo sapiens
IVAFFEFGGV

SEQ ID NO: 45522 - protein, 10 aa, Homo sapiens
IVMKYIHYKL

SEQ ID NO: 45523 - protein, 10 aa, Homo sapiens
APGAAAGPAL

SEQ ID NO: 45524 - protein, 10 aa, Homo sapiens
GPALSPVPPV

SEQ ID NO: 45525 - protein, 10 aa, Homo sapiens
HPAASRDPVA

SEQ ID NO: 45526 - protein, 10 aa, Homo sapiens
GPSMRPLFDF

SEQ ID NO: 45527 - protein, 10 aa, Homo sapiens
TARGRFATVV

SEQ ID NO: 45528 - protein, 10 aa, Homo sapiens
APAPGIFSSQ

SEQ ID NO: 45529 - protein, 10 aa, Homo sapiens
GVNWGRIVAF

SEQ ID NO: 45530 - protein, 10 aa, Homo sapiens
MSSQLHLTPF

SEQ ID NO: 45531 - protein, 10 aa, Homo sapiens
IQDNGGWDAF

SEQ ID NO: 45532 - protein, 10 aa, Homo sapiens
REIVMKYIHY

SEQ ID NO: 45533 - protein, 10 aa, Homo sapiens
RRYRRDFAEM

SEQ ID NO: 45534 - protein, 10 aa, Homo sapiens
GRFATVVEEL

SEQ ID NO: 45535 - protein, 10 aa, Homo sapiens
MSSQLHLTPF

SEQ ID NO: 45536 - protein, 10 aa, Homo sapiens
VAFFEFGGVM

SEQ ID NO: 45537 - protein, 10 aa, Homo sapiens
APGAAAGPAL

SEQ ID NO: 45538 - protein, 10 aa, Homo sapiens
LALVGACITL

SEQ ID NO: 45539 - protein, 10 aa, Homo sapiens
MCVESVNREM

SEQ ID NO: 45540 - protein, 10 aa, Homo sapiens
QAGDDFSRRY

SEQ ID NO: 45541 - protein, 10 aa, Homo sapiens
TPAAPGAAAG

SEQ ID NO: 45542 - protein, 10 aa, Homo sapiens
GVNWGRIVAF

SEQ ID NO: 45543 - protein, 10 aa, Homo sapiens
SPLVDNIALW

SEQ ID NO: 45544 - protein, 10 aa, Homo sapiens
REIVMKYIHY

SEQ ID NO: 45545 - protein, 10 aa, Homo sapiens
AEMSSQLHLT

SEQ ID NO: 45546 - protein, 10 aa, Homo sapiens
REIVMKYIHY

SEQ ID NO: 45547 - protein, 10 aa, Homo sapiens
REIVMKYIHY

SEQ ID NO: 45548 - protein, 10 aa, Homo sapiens
EELFRDGVNW

SEQ ID NO: 45549 - protein, 10 aa, Homo sapiens
AEMSSQLHLT

SEQ ID NO: 45550 - protein, 10 aa, Homo sapiens
REIVMKYIHY

SEQ ID NO: 45551 - protein, 10 aa, Homo sapiens
EELFRDGVNW

SEQ ID NO: 45552 - protein, 10 aa, Homo sapiens
LALVGACITL

SEQ ID NO: 45553 - protein, 10 aa, Homo sapiens
PPGAAPAPGI

SEQ ID NO: 45554 - protein, 10 aa, Homo sapiens
SPLVDNIALW

SEQ ID NO: 45555 - protein, 10 aa, Homo sapiens
HPAASRDPVA

SEQ ID NO: 45556 - protein, 10 aa, Homo sapiens
TPFTARGRFA

SEQ ID NO: 45557 - protein, 10 aa, Homo sapiens
QPGHTPHPAA

SEQ ID NO: 45558 - protein, 10 aa, Homo sapiens
GPALSPVPPV

SEQ ID NO: 45559 - protein, 10 aa, Homo sapiens
SPVPPVVHLT

SEQ ID NO: 45560 - protein, 10 aa, Homo sapiens
HTWIQDNGGW

SEQ ID NO: 45561 - protein, 10 aa, Homo sapiens
MSSQLHLTPF

SEQ ID NO: 45562 - protein, 10 aa, Homo sapiens
HTWIQDNGGW

SEQ ID NO: 45563 - protein, 10 aa, Homo sapiens
SMRPLFDFSW

SEQ ID NO: 45564 - protein, 11 aa, Homo sapiens
ALVGACITLGA

SEQ ID NO: 45565 - protein, 11 aa, Homo sapiens
ALSPVPPVVHL

SEQ ID NO: 45566 - protein, 11 aa, Homo sapiens
SLKTLLSLALV

SEQ ID NO: 45567 - protein, 11 aa, Homo sapiens
IQDNGGWDAFV

SEQ ID NO: 45568 - protein, 11 aa, Homo sapiens
LLSLALVGACI

SEQ ID NO: 45569 - protein, 11 aa, Homo sapiens
SLALVGACITL

SEQ ID NO: 45570 - protein, 11 aa, Homo sapiens
RIVAFFEFGGV

SEQ ID NO: 45571 - protein, 11 aa, Homo sapiens
KLSQRGYEWDA

SEQ ID NO: 45572 - protein, 11 aa, Homo sapiens
SMRPLFDFSWL

SEQ ID NO: 45573 - protein, 11 aa, Homo sapiens
SLKTLLSLALV

SEQ ID NO: 45574 - protein, 11 aa, Homo sapiens
SLALVGACITL

SEQ ID NO: 45575 - protein, 11 aa, Homo sapiens
ALSPVPPVVHL

SEQ ID NO: 45576 - protein, 11 aa, Homo sapiens
LLSLALVGACI

SEQ ID NO: 45577 - protein, 11 aa, Homo sapiens
EMSPLVDNIAL

SEQ ID NO: 45578 - protein, 11 aa, Homo sapiens
ALVGACITLGA

SEQ ID NO: 45579 - protein, 11 aa, Homo sapiens
WLSLKTLLSLA

SEQ ID NO: 45580 - protein, 11 aa, Homo sapiens
FTARGRFATVV

SEQ ID NO: 45581 - protein, 11 aa, Homo sapiens
GAAAGPALSPV

SEQ ID NO: 45582 - protein, 11 aa, Homo sapiens
RIVAFFEFGGV

SEQ ID NO: 45583 - protein, 11 aa, Homo sapiens
YLNRHLHTWIQ

SEQ ID NO: 45584 - protein, 11 aa, Homo sapiens
KLSQRGYEWDA

SEQ ID NO: 45585 - protein, 11 aa, Homo sapiens
TVVEELFRDGV

SEQ ID NO: 45586 - protein, 11 aa, Homo sapiens
VGACITLGAYL

SEQ ID NO: 45587 - protein, 11 aa, Homo sapiens
SLKTLLSLALV

SEQ ID NO: 45588 - protein, 11 aa, Homo sapiens
SMRPLFDFSWL

SEQ ID NO: 45589 - protein, 11 aa, Homo sapiens
RIVAFFEFGGV

SEQ ID NO: 45590 - protein, 11 aa, Homo sapiens
GAAAGPALSPV

SEQ ID NO: 45591 - protein, 11 aa, Homo sapiens
WLSLKTLLSLA

SEQ ID NO: 45592 - protein, 11 aa, Homo sapiens
ALSPVPPVVHL

SEQ ID NO: 45593 - protein, 11 aa, Homo sapiens
ALVGACITLGA

SEQ ID NO: 45594 - protein, 11 aa, Homo sapiens
LLSLALVGACI

SEQ ID NO: 45595 - protein, 11 aa, Homo sapiens
FTARGRFATVV

SEQ ID NO: 45596 - protein, 11 aa, Homo sapiens
SLALVGACITL

SEQ ID NO: 45597 - protein, 11 aa, Homo sapiens
YLNRHLHTWIQ

SEQ ID NO: 45598 - protein, 11 aa, Homo sapiens
TVVEELFRDGV

SEQ ID NO: 45599 - protein, 11 aa, Homo sapiens
KLSQRGYEWDA

SEQ ID NO: 45600 - protein, 11 aa, Homo sapiens
ALSPVPPVVHL

SEQ ID NO: 45601 - protein, 11 aa, Homo sapiens
SLALVGACITL

SEQ ID NO: 45602 - protein, 11 aa, Homo sapiens
FTARGRFATVV

SEQ ID NO: 45603 - protein, 11 aa, Homo sapiens
GAAAGPALSPV

SEQ ID NO: 45604 - protein, 11 aa, Homo sapiens
KLSQRGYEWDA

SEQ ID NO: 45605 - protein, 11 aa, Homo sapiens
YLNRHLHTWIQ

SEQ ID NO: 45606 - protein, 11 aa, Homo sapiens
RIVAFFEFGGV

SEQ ID NO: 45607 - protein, 11 aa, Homo sapiens
IQDNGGWDAFV

SEQ ID NO: 45608 - protein, 11 aa, Homo sapiens
FTARGRFATVV

SEQ ID NO: 45609 - protein, 11 aa, Homo sapiens
TVVEELFRDGV

SEQ ID NO: 45610 - protein, 11 aa, Homo sapiens
ALVGACITLGA

SEQ ID NO: 45611 - protein, 11 aa, Homo sapiens
SQPGHTPHPAA

SEQ ID NO: 45612 - protein, 11 aa, Homo sapiens
LQTPAAPGAAA

SEQ ID NO: 45613 - protein, 11 aa, Homo sapiens
GAAAGPALSPV

SEQ ID NO: 45614 - protein, 11 aa, Homo sapiens
KTLLSLALVGA

SEQ ID NO: 45615 - protein, 11 aa, Homo sapiens
ALSPVPPVVHL

SEQ ID NO: 45616 - protein, 11 aa, Homo sapiens
SMRPLFDFSWL

SEQ ID NO: 45617 - protein, 11 aa, Homo sapiens
SLKTLLSLALV

SEQ ID NO: 45618 - protein, 11 aa, Homo sapiens
WLSLKTLLSLA

SEQ ID NO: 45619 - protein, 11 aa, Homo sapiens
YEWDAGDVGAA

SEQ ID NO: 45620 - protein, 11 aa, Homo sapiens
KLSQRGYEWDA

SEQ ID NO: 45621 - protein, 11 aa, Homo sapiens
ALSPVPPVVHL

SEQ ID NO: 45622 - protein, 11 aa, Homo sapiens
SLKTLLSLALV

SEQ ID NO: 45623 - protein, 11 aa, Homo sapiens
SLALVGACITL

SEQ ID NO: 45624 - protein, 11 aa, Homo sapiens
YLNRHLHTWIQ

SEQ ID NO: 45625 - protein, 11 aa, Homo sapiens
EMSPLVDNIAL

SEQ ID NO: 45626 - protein, 11 aa, Homo sapiens
SMRPLFDFSWL

SEQ ID NO: 45627 - protein, 11 aa, Homo sapiens
ALVGACITLGA

SEQ ID NO: 45628 - protein, 11 aa, Homo sapiens
FTARGRFATVV

SEQ ID NO: 45629 - protein, 11 aa, Homo sapiens
IQDNGGWDAFV

SEQ ID NO: 45630 - protein, 11 aa, Homo sapiens
AFFEFGGVMCV

SEQ ID NO: 45631 - protein, 11 aa, Homo sapiens
PLFDFSWLSLK

SEQ ID NO: 45632 - protein, 11 aa, Homo sapiens
TVVEELFRDGV

SEQ ID NO: 45633 - protein, 11 aa, Homo sapiens
PLVDNIALWMT

SEQ ID NO: 45634 - protein, 11 aa, Homo sapiens
KLSQRGYEWDA

SEQ ID NO: 45635 - protein, 11 aa, Homo sapiens
WLSLKTLLSLA

SEQ ID NO: 45636 - protein, 11 aa, Homo sapiens
RIVAFFEFGGV

SEQ ID NO: 45637 - protein, 11 aa, Homo sapiens
ELYGPSMRPLF

SEQ ID NO: 45638 - protein, 11 aa, Homo sapiens
LLSLALVGACI

SEQ ID NO: 45639 - protein, 11 aa, Homo sapiens
GAAAGPALSPV

SEQ ID NO: 45640 - protein, 11 aa, Homo sapiens
FRDGVNWGRIV

SEQ ID NO: 45641 - protein, 11 aa, Homo sapiens
TLLSLALVGAC

SEQ ID NO: 45642 - protein, 11 aa, Homo sapiens
HLTPFTARGRF

SEQ ID NO: 45643 - protein, 11 aa, Homo sapiens
WMTEYLNRHLH

SEQ ID NO: 45644 - protein, 11 aa, Homo sapiens
ALSPVPPVVHL

SEQ ID NO: 45645 - protein, 11 aa, Homo sapiens
YLNRHLHTWIQ

SEQ ID NO: 45646 - protein, 11 aa, Homo sapiens
FTARGRFATVV

SEQ ID NO: 45647 - protein, 11 aa, Homo sapiens
SMRPLFDFSWL

SEQ ID NO: 45648 - protein, 11 aa, Homo sapiens
SLKTLLSLALV

SEQ ID NO: 45649 - protein, 11 aa, Homo sapiens
SLALVGACITL

SEQ ID NO: 45650 - protein, 11 aa, Homo sapiens
EMSPLVDNIAL

SEQ ID NO: 45651 - protein, 11 aa, Homo sapiens
KLSQRGYEWDA

SEQ ID NO: 45652 - protein, 11 aa, Homo sapiens
ALVGACITLGA

SEQ ID NO: 45653 - protein, 11 aa, Homo sapiens
TVVEELFRDGV

SEQ ID NO: 45654 - protein, 11 aa, Homo sapiens
IQDNGGWDAFV

SEQ ID NO: 45655 - protein, 11 aa, Homo sapiens
AFFEFGGVMCV

SEQ ID NO: 45656 - protein, 11 aa, Homo sapiens
RIVAFFEFGGV

SEQ ID NO: 45657 - protein, 11 aa, Homo sapiens
LLSLALVGACI

SEQ ID NO: 45658 - protein, 11 aa, Homo sapiens
PLVDNIALWMT

SEQ ID NO: 45659 - protein, 11 aa, Homo sapiens
PLFDFSWLSLK

SEQ ID NO: 45660 - protein, 11 aa, Homo sapiens
FRDGVNWGRIV

SEQ ID NO: 45661 - protein, 11 aa, Homo sapiens
ALSPVPPVVHL

SEQ ID NO: 45662 - protein, 11 aa, Homo sapiens
SLALVGACITL

SEQ ID NO: 45663 - protein, 11 aa, Homo sapiens
SLKTLLSLALV

SEQ ID NO: 45664 - protein, 11 aa, Homo sapiens
SMRPLFDFSWL

SEQ ID NO: 45665 - protein, 11 aa, Homo sapiens
FTARGRFATVV

SEQ ID NO: 45666 - protein, 11 aa, Homo sapiens
ALVGACITLGA

SEQ ID NO: 45667 - protein, 11 aa, Homo sapiens
IQDNGGWDAFV

SEQ ID NO: 45668 - protein, 11 aa, Homo sapiens
EMSPLVDNIAL

SEQ ID NO: 45669 - protein, 11 aa, Homo sapiens
YLNRHLHTWIQ

SEQ ID NO: 45670 - protein, 11 aa, Homo sapiens
TVVEELFRDGV

SEQ ID NO: 45671 - protein, 11 aa, Homo sapiens
GAAAGPALSPV

SEQ ID NO: 45672 - protein, 11 aa, Homo sapiens
AFFEFGGVMCV

SEQ ID NO: 45673 - protein, 11 aa, Homo sapiens
PLVDNIALWMT

SEQ ID NO: 45674 - protein, 11 aa, Homo sapiens
RIVAFFEFGGV

SEQ ID NO: 45675 - protein, 11 aa, Homo sapiens
EFGGVMCVESV

SEQ ID NO: 45676 - protein, 11 aa, Homo sapiens
WLSLKTLLSLA

SEQ ID NO: 45677 - protein, 11 aa, Homo sapiens
KLSQRGYEWDA

SEQ ID NO: 45678 - protein, 11 aa, Homo sapiens
LLSLALVGACI

SEQ ID NO: 45679 - protein, 11 aa, Homo sapiens
PLFDFSWLSLK

SEQ ID NO: 45680 - protein, 11 aa, Homo sapiens
ALSPVPPVVHL

SEQ ID NO: 45681 - protein, 11 aa, Homo sapiens
IQDNGGWDAFV

SEQ ID NO: 45682 - protein, 11 aa, Homo sapiens
FTARGRFATVV

SEQ ID NO: 45683 - protein, 11 aa, Homo sapiens
EMSPLVDNIAL

SEQ ID NO: 45684 - protein, 11 aa, Homo sapiens
YLNRHLHTWIQ

SEQ ID NO: 45685 - protein, 11 aa, Homo sapiens
SLALVGACITL

SEQ ID NO: 45686 - protein, 11 aa, Homo sapiens
LLSLALVGACI

SEQ ID NO: 45687 - protein, 11 aa, Homo sapiens
PLVDNIALWMT

SEQ ID NO: 45688 - protein, 11 aa, Homo sapiens
GAAAGPALSPV

SEQ ID NO: 45689 - protein, 11 aa, Homo sapiens
SLKTLLSLALV

SEQ ID NO: 45690 - protein, 11 aa, Homo sapiens
SMRPLFDFSWL

SEQ ID NO: 45691 - protein, 11 aa, Homo sapiens
ALVGACITLGA

SEQ ID NO: 45692 - protein, 11 aa, Homo sapiens
PLFDFSWLSLK

SEQ ID NO: 45693 - protein, 11 aa, Homo sapiens
CITLGAYLGHK

SEQ ID NO: 45694 - protein, 11 aa, Homo sapiens
PLFDFSWLSLK

SEQ ID NO: 45695 - protein, 11 aa, Homo sapiens
SQLHLTPFTAR

SEQ ID NO: 45696 - protein, 11 aa, Homo sapiens
CITLGAYLGHK

SEQ ID NO: 45697 - protein, 11 aa, Homo sapiens
IALWMTEYLNR

SEQ ID NO: 45698 - protein, 11 aa, Homo sapiens
TGYDNREIVMK

SEQ ID NO: 45699 - protein, 11 aa, Homo sapiens
NWGRIVAFFEF

SEQ ID NO: 45700 - protein, 11 aa, Homo sapiens
EYLNRHLHTWI

SEQ ID NO: 45701 - protein, 11 aa, Homo sapiens
HYKLSQRGYEW

SEQ ID NO: 45702 - protein, 11 aa, Homo sapiens
LWMTEYLNRHL

SEQ ID NO: 45703 - protein, 11 aa, Homo sapiens
SWLSLKTLLSL

SEQ ID NO: 45704 - protein, 11 aa, Homo sapiens
EYLNRHLHTWI

SEQ ID NO: 45705 - protein, 11 aa, Homo sapiens
NWGRIVAFFEF

SEQ ID NO: 45706 - protein, 11 aa, Homo sapiens
SWLSLKTLLSL

SEQ ID NO: 45707 - protein, 11 aa, Homo sapiens
LWMTEYLNRHL

SEQ ID NO: 45708 - protein, 11 aa, Homo sapiens
EYLNRHLHTWI

SEQ ID NO: 45709 - protein, 11 aa, Homo sapiens
HYKLSQRGYEW

SEQ ID NO: 45710 - protein, 11 aa, Homo sapiens
NWGRIVAFFEF

SEQ ID NO: 45711 - protein, 11 aa, Homo sapiens
YIHYKLSQRGY

SEQ ID NO: 45712 - protein, 11 aa, Homo sapiens
EMSSQLHLTPF

SEQ ID NO: 45713 - protein, 11 aa, Homo sapiens
YIHYKLSQRGY

SEQ ID NO: 45714 - protein, 11 aa, Homo sapiens
EIVMKYIHYKL

SEQ ID NO: 45715 - protein, 11 aa, Homo sapiens
WIQDNGGWDAF

SEQ ID NO: 45716 - protein, 11 aa, Homo sapiens
ELYGPSMRPLF

SEQ ID NO: 45717 - protein, 11 aa, Homo sapiens
LVGACITLGAY

SEQ ID NO: 45718 - protein, 11 aa, Homo sapiens
DGVNWGRIVAF

SEQ ID NO: 45719 - protein, 11 aa, Homo sapiens
PLFDFSWLSLK

SEQ ID NO: 45720 - protein, 11 aa, Homo sapiens
REIVMKYIHYK

SEQ ID NO: 45721 - protein, 11 aa, Homo sapiens
EMSSQLHLTPF

SEQ ID NO: 45722 - protein, 11 aa, Homo sapiens
RFATVVEELFR

SEQ ID NO: 45723 - protein, 11 aa, Homo sapiens
SQLHLTPFTAR

SEQ ID NO: 45724 - protein, 11 aa, Homo sapiens
AFVELYGPSMR

SEQ ID NO: 45725 - protein, 11 aa, Homo sapiens
IALWMTEYLNR

SEQ ID NO: 45726 - protein, 11 aa, Homo sapiens
REIVMKYIHYK

SEQ ID NO: 45727 - protein, 11 aa, Homo sapiens
MKYIHYKLSQR

SEQ ID NO: 45728 - protein, 11 aa, Homo sapiens
QAGDDFSRRYR

SEQ ID NO: 45729 - protein, 11 aa, Homo sapiens
ELFRDGVNWGR

SEQ ID NO: 45730 - protein, 11 aa, Homo sapiens
RFATVVEELFR

SEQ ID NO: 45731 - protein, 11 aa, Homo sapiens
IALWMTEYLNR

SEQ ID NO: 45732 - protein, 11 aa, Homo sapiens
AFVELYGPSMR

SEQ ID NO: 45733 - protein, 11 aa, Homo sapiens
ELFRDGVNWGR

SEQ ID NO: 45734 - protein, 11 aa, Homo sapiens
CITLGAYLGHK

SEQ ID NO: 45735 - protein, 11 aa, Homo sapiens
IALWMTEYLNR

SEQ ID NO: 45736 - protein, 11 aa, Homo sapiens
HPAASRDPVAR

SEQ ID NO: 45737 - protein, 11 aa, Homo sapiens
MKYIHYKLSQR

SEQ ID NO: 45738 - protein, 11 aa, Homo sapiens
QAGDDFSRRYR

SEQ ID NO: 45739 - protein, 11 aa, Homo sapiens
TGYDNREIVMK

SEQ ID NO: 45740 - protein, 11 aa, Homo sapiens
RFATVVEELFR

SEQ ID NO: 45741 - protein, 11 aa, Homo sapiens
TLRQAGDDFSR

SEQ ID NO: 45742 - protein, 11 aa, Homo sapiens
PLFDFSWLSLK

SEQ ID NO: 45743 - protein, 11 aa, Homo sapiens
FTARGRFATVV

SEQ ID NO: 45744 - protein, 11 aa, Homo sapiens
TVVEELFRDGV

SEQ ID NO: 45745 - protein, 11 aa, Homo sapiens
RIVAFFEFGGV

SEQ ID NO: 45746 - protein, 11 aa, Homo sapiens
EIVMKYIHYKL

SEQ ID NO: 45747 - protein, 11 aa, Homo sapiens
GAAAGPALSPV

SEQ ID NO: 45748 - protein, 11 aa, Homo sapiens
EMSPLVDNIAL

SEQ ID NO: 45749 - protein, 11 aa, Homo sapiens
ESVNREMSPLV

SEQ ID NO: 45750 - protein, 11 aa, Homo sapiens
VGACITLGAYL

SEQ ID NO: 45751 - protein, 11 aa, Homo sapiens
TPHPAASRDPV

SEQ ID NO: 45752 - protein, 11 aa, Homo sapiens
FTARGRFATVV

SEQ ID NO: 45753 - protein, 11 aa, Homo sapiens
EMSPLVDNIAL

SEQ ID NO: 45754 - protein, 11 aa, Homo sapiens
TVVEELFRDGV

SEQ ID NO: 45755 - protein, 11 aa, Homo sapiens
ESVNREMSPLV

SEQ ID NO: 45756 - protein, 11 aa, Homo sapiens
RPLFDFSWLSL

SEQ ID NO: 45757 - protein, 11 aa, Homo sapiens
SPVPPVVHLTL

SEQ ID NO: 45758 - protein, 11 aa, Homo sapiens
TPHPAASRDPV

SEQ ID NO: 45759 - protein, 11 aa, Homo sapiens
GPALSPVPPVV

SEQ ID NO: 45760 - protein, 11 aa, Homo sapiens
SPLVDNIALWM

SEQ ID NO: 45761 - protein, 11 aa, Homo sapiens
RGRFATVVEEL

SEQ ID NO: 45762 - protein, 11 aa, Homo sapiens
TPFTARGRFAT

SEQ ID NO: 45763 - protein, 11 aa, Homo sapiens
RQAGDDFSRRY

SEQ ID NO: 45764 - protein, 11 aa, Homo sapiens
WIQDNGGWDAF

SEQ ID NO: 45765 - protein, 11 aa, Homo sapiens
LVGACITLGAY

SEQ ID NO: 45766 - protein, 11 aa, Homo sapiens
YIHYKLSQRGY

SEQ ID NO: 45767 - protein, 11 aa, Homo sapiens
EMSSQLHLTPF

SEQ ID NO: 45768 - protein, 11 aa, Homo sapiens
GVNWGRIVAFF

SEQ ID NO: 45769 - protein, 11 aa, Homo sapiens
TEYLNRHLHTW

SEQ ID NO: 45770 - protein, 11 aa, Homo sapiens
VELYGPSMRPL

SEQ ID NO: 45771 - protein, 11 aa, Homo sapiens
VESVNREMSPL

SEQ ID NO: 45772 - protein, 11 aa, Homo sapiens
VEELFRDGVNW

SEQ ID NO: 45773 - protein, 11 aa, Homo sapiens
GRFATVVEELF

SEQ ID NO: 45774 - protein, 11 aa, Homo sapiens
RRDFAEMSSQL

SEQ ID NO: 45775 - protein, 11 aa, Homo sapiens
RQAGDDFSRRY

SEQ ID NO: 45776 - protein, 11 aa, Homo sapiens
SPLVDNIALWM

SEQ ID NO: 45777 - protein, 11 aa, Homo sapiens
WIQDNGGWDAF

SEQ ID NO: 45778 - protein, 11 aa, Homo sapiens
DAFVELYGPSM

SEQ ID NO: 45779 - protein, 11 aa, Homo sapiens
EMSSQLHLTPF

SEQ ID NO: 45780 - protein, 11 aa, Homo sapiens
TPFTARGRFAT

SEQ ID NO: 45781 - protein, 11 aa, Homo sapiens
LVGACITLGAY

SEQ ID NO: 45782 - protein, 11 aa, Homo sapiens
IVAFFEFGGVM

SEQ ID NO: 45783 - protein, 11 aa, Homo sapiens
SPVPPVVHLTL

SEQ ID NO: 45784 - protein, 11 aa, Homo sapiens
DGVNWGRIVAF

SEQ ID NO: 45785 - protein, 11 aa, Homo sapiens
SRDPVARTSPL

SEQ ID NO: 45786 - protein, 11 aa, Homo sapiens
VELYGPSMRPL

SEQ ID NO: 45787 - protein, 11 aa, Homo sapiens
VESVNREMSPL

SEQ ID NO: 45788 - protein, 11 aa, Homo sapiens
TEYLNRHLHTW

SEQ ID NO: 45789 - protein, 11 aa, Homo sapiens
AEMSSQLHLTP

SEQ ID NO: 45790 - protein, 11 aa, Homo sapiens
APPGAAPAPGI

SEQ ID NO: 45791 - protein, 11 aa, Homo sapiens
GPALSPVPPVV

SEQ ID NO: 45792 - protein, 11 aa, Homo sapiens
SPVPPVVHLTL

SEQ ID NO: 45793 - protein, 11 aa, Homo sapiens
SPLVDNIALWM

SEQ ID NO: 45794 - protein, 11 aa, Homo sapiens
RPLFDFSWLSL

SEQ ID NO: 45795 - protein, 11 aa, Homo sapiens
TPFTARGRFAT

SEQ ID NO: 45796 - protein, 11 aa, Homo sapiens
SPLQTPAAPGA

SEQ ID NO: 45797 - protein, 11 aa, Homo sapiens
PPVVHLTLRQA

SEQ ID NO: 45798 - protein, 11 aa, Homo sapiens
TPHPAASRDPV

SEQ ID NO: 45799 - protein, 11 aa, Homo sapiens
MSPLVDNIALW

SEQ ID NO: 45800 - protein, 11 aa, Homo sapiens
PSMRPLFDFSW

SEQ ID NO: 45801 - protein, 8 aa, Homo sapiens
HLADSPAV

SEQ ID NO: 45802 - protein, 8 aa, Homo sapiens
FLTGMTVA

SEQ ID NO: 45803 - protein, 8 aa, Homo sapiens
AAWMATYL

SEQ ID NO: 45804 - protein, 8 aa, Homo sapiens
VLVSRIAA

SEQ ID NO: 45805 - protein, 8 aa, Homo sapiens
YQSFEQVV

SEQ ID NO: 45806 - protein, 8 aa, Homo sapiens
GALCVESV

SEQ ID NO: 45807 - protein, 8 aa, Homo sapiens
VLLGSLFS

SEQ ID NO: 45808 - protein, 8 aa, Homo sapiens
FLTGMTVA

SEQ ID NO: 45809 - protein, 8 aa, Homo sapiens
HLADSPAV

SEQ ID NO: 45810 - protein, 8 aa, Homo sapiens
YQSFEQVV

SEQ ID NO: 45811 - protein, 8 aa, Homo sapiens
TVAGVVLL

SEQ ID NO: 45812 - protein, 8 aa, Homo sapiens
FLSYKLSQ

SEQ ID NO: 45813 - protein, 8 aa, Homo sapiens
MAAVKQAL

SEQ ID NO: 45814 - protein, 8 aa, Homo sapiens
SLDAREVI

SEQ ID NO: 45815 - protein, 8 aa, Homo sapiens
ELYGNNAA

SEQ ID NO: 45816 - protein, 8 aa, Homo sapiens
MTVAGVVL

SEQ ID NO: 45817 - protein, 8 aa, Homo sapiens
VLVSRIAA

SEQ ID NO: 45818 - protein, 8 aa, Homo sapiens
SQSNRELV

SEQ ID NO: 45819 - protein, 8 aa, Homo sapiens
FLTGMTVA

SEQ ID NO: 45820 - protein, 8 aa, Homo sapiens
HLADSPAV

SEQ ID NO: 45821 - protein, 8 aa, Homo sapiens
VLVSRIAA

SEQ ID NO: 45822 - protein, 8 aa, Homo sapiens
MQVLVSRI

SEQ ID NO: 45823 - protein, 8 aa, Homo sapiens
FLSYKLSQ

SEQ ID NO: 45824 - protein, 8 aa, Homo sapiens
GVNWGRIV

SEQ ID NO: 45825 - protein, 8 aa, Homo sapiens
GMTVAGVV

SEQ ID NO: 45826 - protein, 8 aa, Homo sapiens
YQSFEQVV

SEQ ID NO: 45827 - protein, 8 aa, Homo sapiens
RIAAWMAT

SEQ ID NO: 45828 - protein, 8 aa, Homo sapiens
EVIPMAAV

SEQ ID NO: 45829 - protein, 8 aa, Homo sapiens
SQSNRELV

SEQ ID NO: 45830 - protein, 8 aa, Homo sapiens
MTVAGVVL

SEQ ID NO: 45831 - protein, 8 aa, Homo sapiens
GALCVESV

SEQ ID NO: 45832 - protein, 8 aa, Homo sapiens
GVVLLGSL

SEQ ID NO: 45833 - protein, 8 aa, Homo sapiens
TVAGVVLL

SEQ ID NO: 45834 - protein, 8 aa, Homo sapiens
HLADSPAV

SEQ ID NO: 45835 - protein, 8 aa, Homo sapiens
SVDKEMQV

SEQ ID NO: 45836 - protein, 8 aa, Homo sapiens
HLADSPAV

SEQ ID NO: 45837 - protein, 8 aa, Homo sapiens
MQVLVSRI

SEQ ID NO: 45838 - protein, 8 aa, Homo sapiens
FLTGMTVA

SEQ ID NO: 45839 - protein, 8 aa, Homo sapiens
SQSNRELV

SEQ ID NO: 45840 - protein, 8 aa, Homo sapiens
YQSFEQVV

SEQ ID NO: 45841 - protein, 8 aa, Homo sapiens
RIVAFFSF

SEQ ID NO: 45842 - protein, 8 aa, Homo sapiens
RIAAWMAT

SEQ ID NO: 45843 - protein, 8 aa, Homo sapiens
GALCVESV

SEQ ID NO: 45844 - protein, 8 aa, Homo sapiens
AAWMATYL

SEQ ID NO: 45845 - protein, 8 aa, Homo sapiens
MTVAGVVL

SEQ ID NO: 45846 - protein, 8 aa, Homo sapiens
VLVSRIAA

SEQ ID NO: 45847 - protein, 8 aa, Homo sapiens
SEMETPSA

SEQ ID NO: 45848 - protein, 8 aa, Homo sapiens
EVIPMAAV

SEQ ID NO: 45849 - protein, 8 aa, Homo sapiens
SVDKEMQV

SEQ ID NO: 45850 - protein, 8 aa, Homo sapiens
HLADSPAV

SEQ ID NO: 45851 - protein, 8 aa, Homo sapiens
SVDKEMQV

SEQ ID NO: 45852 - protein, 8 aa, Homo sapiens
FLTGMTVA

SEQ ID NO: 45853 - protein, 8 aa, Homo sapiens
SLDAREVI

SEQ ID NO: 45854 - protein, 8 aa, Homo sapiens
ELYGNNAA

SEQ ID NO: 45855 - protein, 8 aa, Homo sapiens
TVAGVVLL

SEQ ID NO: 45856 - protein, 8 aa, Homo sapiens
YLNDHLEP

SEQ ID NO: 45857 - protein, 8 aa, Homo sapiens
EVIPMAAV

SEQ ID NO: 45858 - protein, 8 aa, Homo sapiens
GMTVAGVV

SEQ ID NO: 45859 - protein, 8 aa, Homo sapiens
VLVSRIAA

SEQ ID NO: 45860 - protein, 8 aa, Homo sapiens
VLLGSLFS

SEQ ID NO: 45861 - protein, 8 aa, Homo sapiens
GVNWGRIV

SEQ ID NO: 45862 - protein, 8 aa, Homo sapiens
WFLTGMTV

SEQ ID NO: 45863 - protein, 8 aa, Homo sapiens
SFGGALCV

SEQ ID NO: 45864 - protein, 8 aa, Homo sapiens
SSLDAREV

SEQ ID NO: 45865 - protein, 8 aa, Homo sapiens
DLTSQLHI

SEQ ID NO: 45866 - protein, 8 aa, Homo sapiens
YQSFEQVV

SEQ ID NO: 45867 - protein, 8 aa, Homo sapiens
PMAAVKQA

SEQ ID NO: 45868 - protein, 8 aa, Homo sapiens
FLSYKLSQ

SEQ ID NO: 45869 - protein, 8 aa, Homo sapiens
AAWMATYL

SEQ ID NO: 45870 - protein, 8 aa, Homo sapiens
SQSNRELV

SEQ ID NO: 45871 - protein, 8 aa, Homo sapiens
GALCVESV

SEQ ID NO: 45872 - protein, 8 aa, Homo sapiens
HLADSPAV

SEQ ID NO: 45873 - protein, 8 aa, Homo sapiens
ELYGNNAA

SEQ ID NO: 45874 - protein, 8 aa, Homo sapiens
FLTGMTVA

SEQ ID NO: 45875 - protein, 8 aa, Homo sapiens
SVDKEMQV

SEQ ID NO: 45876 - protein, 8 aa, Homo sapiens
SLDAREVI

SEQ ID NO: 45877 - protein, 8 aa, Homo sapiens
VLVSRIAA

SEQ ID NO: 45878 - protein, 8 aa, Homo sapiens
YLNDHLEP

SEQ ID NO: 45879 - protein, 8 aa, Homo sapiens
YQSFEQVV

SEQ ID NO: 45880 - protein, 8 aa, Homo sapiens
EVIPMAAV

SEQ ID NO: 45881 - protein, 8 aa, Homo sapiens
VLLGSLFS

SEQ ID NO: 45882 - protein, 8 aa, Homo sapiens
FLSYKLSQ

SEQ ID NO: 45883 - protein, 8 aa, Homo sapiens
WFLTGMTV

SEQ ID NO: 45884 - protein, 8 aa, Homo sapiens
GMTVAGVV

SEQ ID NO: 45885 - protein, 8 aa, Homo sapiens
HLADSPAV

SEQ ID NO: 45886 - protein, 8 aa, Homo sapiens
SVDKEMQV

SEQ ID NO: 45887 - protein, 8 aa, Homo sapiens
FLTGMTVA

SEQ ID NO: 45888 - protein, 8 aa, Homo sapiens
ELYGNNAA

SEQ ID NO: 45889 - protein, 8 aa, Homo sapiens
EVIPMAAV

SEQ ID NO: 45890 - protein, 8 aa, Homo sapiens
TVAGVVLL

SEQ ID NO: 45891 - protein, 8 aa, Homo sapiens
SLDAREVI

SEQ ID NO: 45892 - protein, 8 aa, Homo sapiens
SFGGALCV

SEQ ID NO: 45893 - protein, 8 aa, Homo sapiens
GMTVAGVV

SEQ ID NO: 45894 - protein, 8 aa, Homo sapiens
AAWMATYL

SEQ ID NO: 45895 - protein, 8 aa, Homo sapiens
VLVSRIAA

SEQ ID NO: 45896 - protein, 8 aa, Homo sapiens
WFLTGMTV

SEQ ID NO: 45897 - protein, 8 aa, Homo sapiens
FLSYKLSQ

SEQ ID NO: 45898 - protein, 8 aa, Homo sapiens
DLTSQLHI

SEQ ID NO: 45899 - protein, 8 aa, Homo sapiens
GVNWGRIV

SEQ ID NO: 45900 - protein, 8 aa, Homo sapiens
PMAAVKQA

SEQ ID NO: 45901 - protein, 8 aa, Homo sapiens
AYQSFEQV

SEQ ID NO: 45902 - protein, 8 aa, Homo sapiens
VLLGSLFS

SEQ ID NO: 45903 - protein, 8 aa, Homo sapiens
GALCVESV

SEQ ID NO: 45904 - protein, 8 aa, Homo sapiens
HLADSPAV

SEQ ID NO: 45905 - protein, 8 aa, Homo sapiens
FLTGMTVA

SEQ ID NO: 45906 - protein, 8 aa, Homo sapiens
SVDKEMQV

SEQ ID NO: 45907 - protein, 8 aa, Homo sapiens
SLDAREVI

SEQ ID NO: 45908 - protein, 8 aa, Homo sapiens
TVAGVVLL

SEQ ID NO: 45909 - protein, 8 aa, Homo sapiens
ELYGNNAA

SEQ ID NO: 45910 - protein, 8 aa, Homo sapiens
WFLTGMTV

SEQ ID NO: 45911 - protein, 8 aa, Homo sapiens
AAWMATYL

SEQ ID NO: 45912 - protein, 8 aa, Homo sapiens
DLTSQLHI

SEQ ID NO: 45913 - protein, 8 aa, Homo sapiens
VLLGSLFS

SEQ ID NO: 45914 - protein, 8 aa, Homo sapiens
LSYKLSQK

SEQ ID NO: 45915 - protein, 8 aa, Homo sapiens
VVDFLSYK

SEQ ID NO: 45916 - protein, 8 aa, Homo sapiens
LLGSLFSR

SEQ ID NO: 45917 - protein, 8 aa, Homo sapiens
VVDFLSYK

SEQ ID NO: 45918 - protein, 8 aa, Homo sapiens
LSYKLSQK

SEQ ID NO: 45919 - protein, 8 aa, Homo sapiens
VIPMAAVK

SEQ ID NO: 45920 - protein, 8 aa, Homo sapiens
QVVNELFR

SEQ ID NO: 45921 - protein, 8 aa, Homo sapiens
LVVDFLSY

SEQ ID NO: 45922 - protein, 8 aa, Homo sapiens
NAAAESRK

SEQ ID NO: 45923 - protein, 8 aa, Homo sapiens
NWGRIVAF

SEQ ID NO: 45924 - protein, 8 aa, Homo sapiens
RIVAFFSF

SEQ ID NO: 45925 - protein, 8 aa, Homo sapiens
VVLLGSLF

SEQ ID NO: 45926 - protein, 8 aa, Homo sapiens
NWGRIVAF

SEQ ID NO: 45927 - protein, 8 aa, Homo sapiens
AYQSFEQV

SEQ ID NO: 45928 - protein, 8 aa, Homo sapiens
EVIPMAAV

SEQ ID NO: 45929 - protein, 8 aa, Homo sapiens
LVVDFLSY

SEQ ID NO: 45930 - protein, 8 aa, Homo sapiens
EVIPMAAV

SEQ ID NO: 45931 - protein, 8 aa, Homo sapiens
LVVDFLSY

SEQ ID NO: 45932 - protein, 8 aa, Homo sapiens
HITPGTAY

SEQ ID NO: 45933 - protein, 8 aa, Homo sapiens
ELRYRRAF

SEQ ID NO: 45934 - protein, 8 aa, Homo sapiens
RIVAFFSF

SEQ ID NO: 45935 - protein, 8 aa, Homo sapiens
HITPGTAY

SEQ ID NO: 45936 - protein, 8 aa, Homo sapiens
LVVDFLSY

SEQ ID NO: 45937 - protein, 8 aa, Homo sapiens
KGQERFNR

SEQ ID NO: 45938 - protein, 8 aa, Homo sapiens
LLGSLFSR

SEQ ID NO: 45939 - protein, 8 aa, Homo sapiens
EMQVLVSR

SEQ ID NO: 45940 - protein, 8 aa, Homo sapiens
HSSSLDAR

SEQ ID NO: 45941 - protein, 8 aa, Homo sapiens
AAVKQALR

SEQ ID NO: 45942 - protein, 8 aa, Homo sapiens
EFELRYRR

SEQ ID NO: 45943 - protein, 8 aa, Homo sapiens
QVVNELFR

SEQ ID NO: 45944 - protein, 8 aa, Homo sapiens
LSYKLSQK

SEQ ID NO: 45945 - protein, 8 aa, Homo sapiens
EFELRYRR

SEQ ID NO: 45946 - protein, 8 aa, Homo sapiens
EMQVLVSR

SEQ ID NO: 45947 - protein, 8 aa, Homo sapiens
DEFELRYR

SEQ ID NO: 45948 - protein, 8 aa, Homo sapiens
ESRKGQER

SEQ ID NO: 45949 - protein, 8 aa, Homo sapiens
LLGSLFSR

SEQ ID NO: 45950 - protein, 8 aa, Homo sapiens
HSSSLDAR

SEQ ID NO: 45951 - protein, 8 aa, Homo sapiens
QVVNELFR

SEQ ID NO: 45952 - protein, 8 aa, Homo sapiens
HSSSLDAR

SEQ ID NO: 45953 - protein, 8 aa, Homo sapiens
NAAAESRK

SEQ ID NO: 45954 - protein, 8 aa, Homo sapiens
LSYKLSQK

SEQ ID NO: 45955 - protein, 8 aa, Homo sapiens
EMQVLVSR

SEQ ID NO: 45956 - protein, 8 aa, Homo sapiens
NNAAAESR

SEQ ID NO: 45957 - protein, 8 aa, Homo sapiens
AAVKQALR

SEQ ID NO: 45958 - protein, 8 aa, Homo sapiens
ESRKGQER

SEQ ID NO: 45959 - protein, 8 aa, Homo sapiens
IAAWMATY

SEQ ID NO: 45960 - protein, 8 aa, Homo sapiens
EFELRYRR

SEQ ID NO: 45961 - protein, 8 aa, Homo sapiens
TAYQSFEQ

SEQ ID NO: 45962 - protein, 8 aa, Homo sapiens
VVDFLSYK

SEQ ID NO: 45963 - protein, 8 aa, Homo sapiens
DEFELRYR

SEQ ID NO: 45964 - protein, 8 aa, Homo sapiens
FSDVEENR

SEQ ID NO: 45965 - protein, 8 aa, Homo sapiens
LLGSLFSR

SEQ ID NO: 45966 - protein, 8 aa, Homo sapiens
EVIPMAAV

SEQ ID NO: 45967 - protein, 8 aa, Homo sapiens
TVAGVVLL

SEQ ID NO: 45968 - protein, 8 aa, Homo sapiens
TGMTVAGV

SEQ ID NO: 45969 - protein, 8 aa, Homo sapiens
MTVAGVVL

SEQ ID NO: 45970 - protein, 8 aa, Homo sapiens
MAAVKQAL

SEQ ID NO: 45971 - protein, 8 aa, Homo sapiens
HLADSPAV

SEQ ID NO: 45972 - protein, 8 aa, Homo sapiens
ERFNRWFL

SEQ ID NO: 45973 - protein, 8 aa, Homo sapiens
DSPAVNGA

SEQ ID NO: 45974 - protein, 8 aa, Homo sapiens
ELYGNNAA

SEQ ID NO: 45975 - protein, 8 aa, Homo sapiens
EAGDEFEL

SEQ ID NO: 45976 - protein, 8 aa, Homo sapiens
EVIPMAAV

SEQ ID NO: 45977 - protein, 8 aa, Homo sapiens
HLADSPAV

SEQ ID NO: 45978 - protein, 8 aa, Homo sapiens
ELYGNNAA

SEQ ID NO: 45979 - protein, 8 aa, Homo sapiens
MTVAGVVL

SEQ ID NO: 45980 - protein, 8 aa, Homo sapiens
TVAGVVLL

SEQ ID NO: 45981 - protein, 8 aa, Homo sapiens
EAGDEFEL

SEQ ID NO: 45982 - protein, 8 aa, Homo sapiens
SVDKEMQV

SEQ ID NO: 45983 - protein, 8 aa, Homo sapiens
WFLTGMTV

SEQ ID NO: 45984 - protein, 8 aa, Homo sapiens
SPAVNGAT

SEQ ID NO: 45985 - protein, 8 aa, Homo sapiens
MAAVKQAL

SEQ ID NO: 45986 - protein, 8 aa, Homo sapiens
AAWMATYL

SEQ ID NO: 45987 - protein, 8 aa, Homo sapiens
ELRYRRAF

SEQ ID NO: 45988 - protein, 8 aa, Homo sapiens
LVVDFLSY

SEQ ID NO: 45989 - protein, 8 aa, Homo sapiens
RIVAFFSF

SEQ ID NO: 45990 - protein, 8 aa, Homo sapiens
HITPGTAY

SEQ ID NO: 45991 - protein, 8 aa, Homo sapiens
IAAWMATY

SEQ ID NO: 45992 - protein, 8 aa, Homo sapiens
ELRYRRAF

SEQ ID NO: 45993 - protein, 8 aa, Homo sapiens
VVLLGSLF

SEQ ID NO: 45994 - protein, 8 aa, Homo sapiens
QERFNRWF

SEQ ID NO: 45995 - protein, 8 aa, Homo sapiens
RELVVDFL

SEQ ID NO: 45996 - protein, 8 aa, Homo sapiens
FEQVVNEL

SEQ ID NO: 45997 - protein, 8 aa, Homo sapiens
NRWFLTGM

SEQ ID NO: 45998 - protein, 8 aa, Homo sapiens
IAAWMATY

SEQ ID NO: 45999 - protein, 8 aa, Homo sapiens
LVVDFLSY

SEQ ID NO: 46000 - protein, 8 aa, Homo sapiens
MAAVKQAL

SEQ ID NO: 46001 - protein, 8 aa, Homo sapiens
HITPGTAY

SEQ ID NO: 46002 - protein, 8 aa, Homo sapiens
DAREVIPM

SEQ ID NO: 46003 - protein, 8 aa, Homo sapiens
FFSFGGAL

SEQ ID NO: 46004 - protein, 8 aa, Homo sapiens
SPAVNGAT

SEQ ID NO: 46005 - protein, 8 aa, Homo sapiens
AAWMATYL

SEQ ID NO: 46006 - protein, 8 aa, Homo sapiens
MTVAGVVL

SEQ ID NO: 46007 - protein, 8 aa, Homo sapiens
RELVVDFL

SEQ ID NO: 46008 - protein, 8 aa, Homo sapiens
FEQVVNEL

SEQ ID NO: 46009 - protein, 8 aa, Homo sapiens
RELVVDFL

SEQ ID NO: 46010 - protein, 8 aa, Homo sapiens
KEMQVLVS

SEQ ID NO: 46011 - protein, 8 aa, Homo sapiens
REVIPMAA

SEQ ID NO: 46012 - protein, 8 aa, Homo sapiens
LVSRIAAW

SEQ ID NO: 46013 - protein, 8 aa, Homo sapiens
IAAWMATY

SEQ ID NO: 46014 - protein, 8 aa, Homo sapiens
LSQKGYSW

SEQ ID NO: 46015 - protein, 8 aa, Homo sapiens
KGYSWSQF

SEQ ID NO: 46016 - protein, 8 aa, Homo sapiens
RIVAFFSF

SEQ ID NO: 46017 - protein, 8 aa, Homo sapiens
AINGNPSW

SEQ ID NO: 46018 - protein, 9 aa, Homo sapiens
FSDLTSQLH

SEQ ID NO: 46019 - protein, 9 aa, Homo sapiens
FSFGGALCV

SEQ ID NO: 46020 - protein, 9 aa, Homo sapiens
MTVAGVVLL

SEQ ID NO: 46021 - protein, 9 aa, Homo sapiens
YLNDHLEPW

SEQ ID NO: 46022 - protein, 9 aa, Homo sapiens
MTVAGVVLL

SEQ ID NO: 46023 - protein, 9 aa, Homo sapiens
IAAWMATYL

SEQ ID NO: 46024 - protein, 9 aa, Homo sapiens
FLTGMTVAG

SEQ ID NO: 46025 - protein, 9 aa, Homo sapiens
FLSYKLSQK

SEQ ID NO: 46026 - protein, 9 aa, Homo sapiens
LVSRIAAWM

SEQ ID NO: 46027 - protein, 9 aa, Homo sapiens
VVDFLSYKL

SEQ ID NO: 46028 - protein, 9 aa, Homo sapiens
ELYGNNAAA

SEQ ID NO: 46029 - protein, 9 aa, Homo sapiens
PMAAVKQAL

SEQ ID NO: 46030 - protein, 9 aa, Homo sapiens
GMTVAGVVL

SEQ ID NO: 46031 - protein, 9 aa, Homo sapiens
LTGMTVAGV

SEQ ID NO: 46032 - protein, 9 aa, Homo sapiens
MTVAGVVLL

SEQ ID NO: 46033 - protein, 9 aa, Homo sapiens
IAAWMATYL

SEQ ID NO: 46034 - protein, 9 aa, Homo sapiens
AVKQALREA

SEQ ID NO: 46035 - protein, 9 aa, Homo sapiens
QLHITPGTA

SEQ ID NO: 46036 - protein, 9 aa, Homo sapiens
YLNDHLEPW

SEQ ID NO: 46037 - protein, 9 aa, Homo sapiens
TAYQSFEQV

SEQ ID NO: 46038 - protein, 9 aa, Homo sapiens
FLSYKLSQK

SEQ ID NO: 46039 - protein, 9 aa, Homo sapiens
LTGMTVAGV

SEQ ID NO: 46040 - protein, 9 aa, Homo sapiens
MTVAGVVLL

SEQ ID NO: 46041 - protein, 9 aa, Homo sapiens
SQLHITPGT

SEQ ID NO: 46042 - protein, 9 aa, Homo sapiens
MTVAGVVLL

SEQ ID NO: 46043 - protein, 9 aa, Homo sapiens
TAYQSFEQV

SEQ ID NO: 46044 - protein, 9 aa, Homo sapiens
SQSNRELVV

SEQ ID NO: 46045 - protein, 9 aa, Homo sapiens
FSFGGALCV

SEQ ID NO: 46046 - protein, 9 aa, Homo sapiens
REVIPMAAV

SEQ ID NO: 46047 - protein, 9 aa, Homo sapiens
IAAWMATYL

SEQ ID NO: 46048 - protein, 9 aa, Homo sapiens
MQVLVSRIA

SEQ ID NO: 46049 - protein, 9 aa, Homo sapiens
LTGMTVAGV

SEQ ID NO: 46050 - protein, 9 aa, Homo sapiens
YLNDHLEPW

SEQ ID NO: 46051 - protein, 9 aa, Homo sapiens
SEMETPSAI

SEQ ID NO: 46052 - protein, 9 aa, Homo sapiens
ELYGNNAAA

SEQ ID NO: 46053 - protein, 9 aa, Homo sapiens
FSFGGALCV

SEQ ID NO: 46054 - protein, 9 aa, Homo sapiens
PMAAVKQAL

SEQ ID NO: 46055 - protein, 9 aa, Homo sapiens
YLNDHLEPW

SEQ ID NO: 46056 - protein, 9 aa, Homo sapiens
SVDKEMQVL

SEQ ID NO: 46057 - protein, 9 aa, Homo sapiens
VVDFLSYKL

SEQ ID NO: 46058 - protein, 9 aa, Homo sapiens
MTVAGVVLL

SEQ ID NO: 46059 - protein, 9 aa, Homo sapiens
HITPGTAYQ

SEQ ID NO: 46060 - protein, 9 aa, Homo sapiens
TAYQSFEQV

SEQ ID NO: 46061 - protein, 9 aa, Homo sapiens
VLLGSLFSR

SEQ ID NO: 46062 - protein, 9 aa, Homo sapiens
FLTGMTVAG

SEQ ID NO: 46063 - protein, 9 aa, Homo sapiens
GVNWGRIVA

SEQ ID NO: 46064 - protein, 9 aa, Homo sapiens
GMTVAGVVL

SEQ ID NO: 46065 - protein, 9 aa, Homo sapiens
GGWDTFVEL

SEQ ID NO: 46066 - protein, 9 aa, Homo sapiens
AFSDLTSQL

SEQ ID NO: 46067 - protein, 9 aa, Homo sapiens
HLEPWIQEN

SEQ ID NO: 46068 - protein, 9 aa, Homo sapiens
ELYGNNAAA

SEQ ID NO: 46069 - protein, 9 aa, Homo sapiens
PMAAVKQAL

SEQ ID NO: 46070 - protein, 9 aa, Homo sapiens
FSFGGALCV

SEQ ID NO: 46071 - protein, 9 aa, Homo sapiens
YLNDHLEPW

SEQ ID NO: 46072 - protein, 9 aa, Homo sapiens
VLLGSLFSR

SEQ ID NO: 46073 - protein, 9 aa, Homo sapiens
VVDFLSYKL

SEQ ID NO: 46074 - protein, 9 aa, Homo sapiens
SVDKEMQVL

SEQ ID NO: 46075 - protein, 9 aa, Homo sapiens
FLTGMTVAG

SEQ ID NO: 46076 - protein, 9 aa, Homo sapiens
AYQSFEQVV

SEQ ID NO: 46077 - protein, 9 aa, Homo sapiens
ELYGNNAAA

SEQ ID NO: 46078 - protein, 9 aa, Homo sapiens
PMAAVKQAL

SEQ ID NO: 46079 - protein, 9 aa, Homo sapiens
FSFGGALCV

SEQ ID NO: 46080 - protein, 9 aa, Homo sapiens
TAYQSFEQV

SEQ ID NO: 46081 - protein, 9 aa, Homo sapiens
HITPGTAYQ

SEQ ID NO: 46082 - protein, 9 aa, Homo sapiens
GMTVAGVVL

SEQ ID NO: 46083 - protein, 9 aa, Homo sapiens
PMAAVKQAL

SEQ ID NO: 46084 - protein, 9 aa, Homo sapiens
FSFGGALCV

SEQ ID NO: 46085 - protein, 9 aa, Homo sapiens
ELYGNNAAA

SEQ ID NO: 46086 - protein, 9 aa, Homo sapiens
TAYQSFEQV

SEQ ID NO: 46087 - protein, 9 aa, Homo sapiens
YLNDHLEPW

SEQ ID NO: 46088 - protein, 9 aa, Homo sapiens
VLLGSLFSR

SEQ ID NO: 46089 - protein, 9 aa, Homo sapiens
LTGMTVAGV

SEQ ID NO: 46090 - protein, 9 aa, Homo sapiens
LLGSLFSRK

SEQ ID NO: 46091 - protein, 9 aa, Homo sapiens
FLSYKLSQK

SEQ ID NO: 46092 - protein, 9 aa, Homo sapiens
RIAAWMATY

SEQ ID NO: 46093 - protein, 9 aa, Homo sapiens
VLLGSLFSR

SEQ ID NO: 46094 - protein, 9 aa, Homo sapiens
LVVDFLSYK

SEQ ID NO: 46095 - protein, 9 aa, Homo sapiens
LVVDFLSYK

SEQ ID NO: 46096 - protein, 9 aa, Homo sapiens
LLGSLFSRK

SEQ ID NO: 46097 - protein, 9 aa, Homo sapiens
VLLGSLFSR

SEQ ID NO: 46098 - protein, 9 aa, Homo sapiens
RIAAWMATY

SEQ ID NO: 46099 - protein, 9 aa, Homo sapiens
ALCVESVDK

SEQ ID NO: 46100 - protein, 9 aa, Homo sapiens
EVIPMAAVK

SEQ ID NO: 46101 - protein, 9 aa, Homo sapiens
FLSYKLSQK

SEQ ID NO: 46102 - protein, 9 aa, Homo sapiens
RYRRAFSDL

SEQ ID NO: 46103 - protein, 9 aa, Homo sapiens
NWGRIVAFF

SEQ ID NO: 46104 - protein, 9 aa, Homo sapiens
GRIVAFFSF

SEQ ID NO: 46105 - protein, 9 aa, Homo sapiens
NWGRIVAFF

SEQ ID NO: 46106 - protein, 9 aa, Homo sapiens
RYRRAFSDL

SEQ ID NO: 46107 - protein, 9 aa, Homo sapiens
RYRRAFSDL

SEQ ID NO: 46108 - protein, 9 aa, Homo sapiens
SFEQVVNEL

SEQ ID NO: 46109 - protein, 9 aa, Homo sapiens
AYQSFEQVV

SEQ ID NO: 46110 - protein, 9 aa, Homo sapiens
ELVVDFLSY

SEQ ID NO: 46111 - protein, 9 aa, Homo sapiens
RIAAWMATY

SEQ ID NO: 46112 - protein, 9 aa, Homo sapiens
RIAAWMATY

SEQ ID NO: 46113 - protein, 9 aa, Homo sapiens
ELVVDFLSY

SEQ ID NO: 46114 - protein, 9 aa, Homo sapiens
LVSRIAAWM

SEQ ID NO: 46115 - protein, 9 aa, Homo sapiens
SVDKEMQVL

SEQ ID NO: 46116 - protein, 9 aa, Homo sapiens
EVIPMAAVK

SEQ ID NO: 46117 - protein, 9 aa, Homo sapiens
MTVAGVVLL

SEQ ID NO: 46118 - protein, 9 aa, Homo sapiens
LHITPGTAY

SEQ ID NO: 46119 - protein, 9 aa, Homo sapiens
ELVVDFLSY

SEQ ID NO: 46120 - protein, 9 aa, Homo sapiens
RIAAWMATY

SEQ ID NO: 46121 - protein, 9 aa, Homo sapiens
MAAVKQALR

SEQ ID NO: 46122 - protein, 9 aa, Homo sapiens
VLLGSLFSR

SEQ ID NO: 46123 - protein, 9 aa, Homo sapiens
LVVDFLSYK

SEQ ID NO: 46124 - protein, 9 aa, Homo sapiens
KEMQVLVSR

SEQ ID NO: 46125 - protein, 9 aa, Homo sapiens
DEFELRYRR

SEQ ID NO: 46126 - protein, 9 aa, Homo sapiens
MAAVKQALR

SEQ ID NO: 46127 - protein, 9 aa, Homo sapiens
ELRYRRAFS

SEQ ID NO: 46128 - protein, 9 aa, Homo sapiens
VLLGSLFSR

SEQ ID NO: 46129 - protein, 9 aa, Homo sapiens
EAGDEFELR

SEQ ID NO: 46130 - protein, 9 aa, Homo sapiens
QFSDVEENR

SEQ ID NO: 46131 - protein, 9 aa, Homo sapiens
EVIPMAAVK

SEQ ID NO: 46132 - protein, 9 aa, Homo sapiens
MAAVKQALR

SEQ ID NO: 46133 - protein, 9 aa, Homo sapiens
LVVDFLSYK

SEQ ID NO: 46134 - protein, 9 aa, Homo sapiens
EAGDEFELR

SEQ ID NO: 46135 - protein, 9 aa, Homo sapiens
EQVVNELFR

SEQ ID NO: 46136 - protein, 9 aa, Homo sapiens
FLSYKLSQK

SEQ ID NO: 46137 - protein, 9 aa, Homo sapiens
DEFELRYRR

SEQ ID NO: 46138 - protein, 9 aa, Homo sapiens
QFSDVEENR

SEQ ID NO: 46139 - protein, 9 aa, Homo sapiens
NNAAAESRK

SEQ ID NO: 46140 - protein, 9 aa, Homo sapiens
VLLGSLFSR

SEQ ID NO: 46141 - protein, 9 aa, Homo sapiens
MTVAGVVLL

SEQ ID NO: 46142 - protein, 9 aa, Homo sapiens
TAYQSFEQV

SEQ ID NO: 46143 - protein, 9 aa, Homo sapiens
TGMTVAGVV

SEQ ID NO: 46144 - protein, 9 aa, Homo sapiens
MSQSNRELV

SEQ ID NO: 46145 - protein, 9 aa, Homo sapiens
YSWSQFSDV

SEQ ID NO: 46146 - protein, 9 aa, Homo sapiens
FSFGGALCV

SEQ ID NO: 46147 - protein, 9 aa, Homo sapiens
ESVDKEMQV

SEQ ID NO: 46148 - protein, 9 aa, Homo sapiens
MATYLNDHL

SEQ ID NO: 46149 - protein, 9 aa, Homo sapiens
ELYGNNAAA

SEQ ID NO: 46150 - protein, 9 aa, Homo sapiens
VAFFSFGGA

SEQ ID NO: 46151 - protein, 9 aa, Homo sapiens
LTGMTVAGV

SEQ ID NO: 46152 - protein, 9 aa, Homo sapiens
IAAWMATYL

SEQ ID NO: 46153 - protein, 9 aa, Homo sapiens
MTVAGVVLL

SEQ ID NO: 46154 - protein, 9 aa, Homo sapiens
TAYQSFEQV

SEQ ID NO: 46155 - protein, 9 aa, Homo sapiens
ELYGNNAAA

SEQ ID NO: 46156 - protein, 9 aa, Homo sapiens
FSFGGALCV

SEQ ID NO: 46157 - protein, 9 aa, Homo sapiens
LTGMTVAGV

SEQ ID NO: 46158 - protein, 9 aa, Homo sapiens
YSWSQFSDV

SEQ ID NO: 46159 - protein, 9 aa, Homo sapiens
APEGTESEM

SEQ ID NO: 46160 - protein, 9 aa, Homo sapiens
SPAVNGATG

SEQ ID NO: 46161 - protein, 9 aa, Homo sapiens
TPGTAYQSF

SEQ ID NO: 46162 - protein, 9 aa, Homo sapiens
FELRYRRAF

SEQ ID NO: 46163 - protein, 9 aa, Homo sapiens
RIAAWMATY

SEQ ID NO: 46164 - protein, 9 aa, Homo sapiens
ALREAGDEF

SEQ ID NO: 46165 - protein, 9 aa, Homo sapiens
FELRYRRAF

SEQ ID NO: 46166 - protein, 9 aa, Homo sapiens
QERFNRWFL

SEQ ID NO: 46167 - protein, 9 aa, Homo sapiens
FEQVVNELF

SEQ ID NO: 46168 - protein, 9 aa, Homo sapiens
QENGGWDTF

SEQ ID NO: 46169 - protein, 9 aa, Homo sapiens
GRIVAFFSF

SEQ ID NO: 46170 - protein, 9 aa, Homo sapiens
RRAFSDLTS

SEQ ID NO: 46171 - protein, 9 aa, Homo sapiens
TPGTAYQSF

SEQ ID NO: 46172 - protein, 9 aa, Homo sapiens
IAAWMATYL

SEQ ID NO: 46173 - protein, 9 aa, Homo sapiens
APEGTESEM

SEQ ID NO: 46174 - protein, 9 aa, Homo sapiens
ELVVDFLSY

SEQ ID NO: 46175 - protein, 9 aa, Homo sapiens
LHITPGTAY

SEQ ID NO: 46176 - protein, 9 aa, Homo sapiens
NPSWHLADS

SEQ ID NO: 46177 - protein, 9 aa, Homo sapiens
RIAAWMATY

SEQ ID NO: 46178 - protein, 9 aa, Homo sapiens
REAGDEFEL

SEQ ID NO: 46179 - protein, 9 aa, Homo sapiens
QERFNRWFL

SEQ ID NO: 46180 - protein, 9 aa, Homo sapiens
QENGGWDTF

SEQ ID NO: 46181 - protein, 9 aa, Homo sapiens
FEQVVNELF

SEQ ID NO: 46182 - protein, 9 aa, Homo sapiens
FELRYRRAF

SEQ ID NO: 46183 - protein, 9 aa, Homo sapiens
SEMETPSAI

SEQ ID NO: 46184 - protein, 9 aa, Homo sapiens
FELRYRRAF

SEQ ID NO: 46185 - protein, 9 aa, Homo sapiens
QENGGWDTF

SEQ ID NO: 46186 - protein, 9 aa, Homo sapiens
SEMETPSAI

SEQ ID NO: 46187 - protein, 9 aa, Homo sapiens
RELVVDFLS

SEQ ID NO: 46188 - protein, 9 aa, Homo sapiens
REVIPMAAV

SEQ ID NO: 46189 - protein, 9 aa, Homo sapiens
IAAWMATYL

SEQ ID NO: 46190 - protein, 9 aa, Homo sapiens
IPMAAVKQA

SEQ ID NO: 46191 - protein, 9 aa, Homo sapiens
SAINGNPSW

SEQ ID NO: 46192 - protein, 9 aa, Homo sapiens
KLSQKGYSW

SEQ ID NO: 46193 - protein, 9 aa, Homo sapiens
IAAWMATYL

SEQ ID NO: 46194 - protein, 9 aa, Homo sapiens
YLNDHLEPW

SEQ ID NO: 46195 - protein, 10 aa, Homo sapiens
FSDLTSQLHI

SEQ ID NO: 46196 - protein, 10 aa, Homo sapiens
YLNDHLEPWI

SEQ ID NO: 46197 - protein, 10 aa, Homo sapiens
FLTGMTVAGV

SEQ ID NO: 46198 - protein, 10 aa, Homo sapiens
RIAAWMATYL

SEQ ID NO: 46199 - protein, 10 aa, Homo sapiens
WMATYLNDHL

SEQ ID NO: 46200 - protein, 10 aa, Homo sapiens
LVVDFLSYKL

SEQ ID NO: 46201 - protein, 10 aa, Homo sapiens
SLDAREVIPM

SEQ ID NO: 46202 - protein, 10 aa, Homo sapiens
VLVSRIAAWM

SEQ ID NO: 46203 - protein, 10 aa, Homo sapiens
SVDKEMQVLV

SEQ ID NO: 46204 - protein, 10 aa, Homo sapiens
GMTVAGVVLL

SEQ ID NO: 46205 - protein, 10 aa, Homo sapiens
FLTGMTVAGV

SEQ ID NO: 46206 - protein, 10 aa, Homo sapiens
WMATYLNDHL

SEQ ID NO: 46207 - protein, 10 aa, Homo sapiens
RIAAWMATYL

SEQ ID NO: 46208 - protein, 10 aa, Homo sapiens
LVVDFLSYKL

SEQ ID NO: 46209 - protein, 10 aa, Homo sapiens
RAFSDLTSQL

SEQ ID NO: 46210 - protein, 10 aa, Homo sapiens
SLDAREVIPM

SEQ ID NO: 46211 - protein, 10 aa, Homo sapiens
YLNDHLEPWI

SEQ ID NO: 46212 - protein, 10 aa, Homo sapiens
GMTVAGVVLL

SEQ ID NO: 46213 - protein, 10 aa, Homo sapiens
FGGALCVESV

SEQ ID NO: 46214 - protein, 10 aa, Homo sapiens
VLVSRIAAWM

SEQ ID NO: 46215 - protein, 10 aa, Homo sapiens
FLTGMTVAGV

SEQ ID NO: 46216 - protein, 10 aa, Homo sapiens
YLNDHLEPWI

SEQ ID NO: 46217 - protein, 10 aa, Homo sapiens
RIAAWMATYL

SEQ ID NO: 46218 - protein, 10 aa, Homo sapiens
WMATYLNDHL

SEQ ID NO: 46219 - protein, 10 aa, Homo sapiens
VLVSRIAAWM

SEQ ID NO: 46220 - protein, 10 aa, Homo sapiens
IVAFFSFGGA

SEQ ID NO: 46221 - protein, 10 aa, Homo sapiens
LVVDFLSYKL

SEQ ID NO: 46222 - protein, 10 aa, Homo sapiens
VVNELFRDGV

SEQ ID NO: 46223 - protein, 10 aa, Homo sapiens
GMTVAGVVLL

SEQ ID NO: 46224 - protein, 10 aa, Homo sapiens
RAFSDLTSQL

SEQ ID NO: 46225 - protein, 10 aa, Homo sapiens
LTGMTVAGVV

SEQ ID NO: 46226 - protein, 10 aa, Homo sapiens
GTAYQSFEQV

SEQ ID NO: 46227 - protein, 10 aa, Homo sapiens
FLTGMTVAGV

SEQ ID NO: 46228 - protein, 10 aa, Homo sapiens
YLNDHLEPWI

SEQ ID NO: 46229 - protein, 10 aa, Homo sapiens
SLDAREVIPM

SEQ ID NO: 46230 - protein, 10 aa, Homo sapiens
RIAAWMATYL

SEQ ID NO: 46231 - protein, 10 aa, Homo sapiens
LVVDFLSYKL

SEQ ID NO: 46232 - protein, 10 aa, Homo sapiens
AINGNPSWHL

SEQ ID NO: 46233 - protein, 10 aa, Homo sapiens
FLTGMTVAGV

SEQ ID NO: 46234 - protein, 10 aa, Homo sapiens
RIAAWMATYL

SEQ ID NO: 46235 - protein, 10 aa, Homo sapiens
YLNDHLEPWI

SEQ ID NO: 46236 - protein, 10 aa, Homo sapiens
MQVLVSRIAA

SEQ ID NO: 46237 - protein, 10 aa, Homo sapiens
LVVDFLSYKL

SEQ ID NO: 46238 - protein, 10 aa, Homo sapiens
WMATYLNDHL

SEQ ID NO: 46239 - protein, 10 aa, Homo sapiens
SQLHITPGTA

SEQ ID NO: 46240 - protein, 10 aa, Homo sapiens
GTAYQSFEQV

SEQ ID NO: 46241 - protein, 10 aa, Homo sapiens
SVDKEMQVLV

SEQ ID NO: 46242 - protein, 10 aa, Homo sapiens
RAFSDLTSQL

SEQ ID NO: 46243 - protein, 10 aa, Homo sapiens
KEMQVLVSRI

SEQ ID NO: 46244 - protein, 10 aa, Homo sapiens
IQENGGWDTF

SEQ ID NO: 46245 - protein, 10 aa, Homo sapiens
IVAFFSFGGA

SEQ ID NO: 46246 - protein, 10 aa, Homo sapiens
VVNELFRDGV

SEQ ID NO: 46247 - protein, 10 aa, Homo sapiens
TAYQSFEQVV

SEQ ID NO: 46248 - protein, 10 aa, Homo sapiens
FLTGMTVAGV

SEQ ID NO: 46249 - protein, 10 aa, Homo sapiens
YLNDHLEPWI

SEQ ID NO: 46250 - protein, 10 aa, Homo sapiens
SVDKEMQVLV

SEQ ID NO: 46251 - protein, 10 aa, Homo sapiens
SLDAREVIPM

SEQ ID NO: 46252 - protein, 10 aa, Homo sapiens
GMTVAGVVLL

SEQ ID NO: 46253 - protein, 10 aa, Homo sapiens
LVVDFLSYKL

SEQ ID NO: 46254 - protein, 10 aa, Homo sapiens
RIAAWMATYL

SEQ ID NO: 46255 - protein, 10 aa, Homo sapiens
VVNELFRDGV

SEQ ID NO: 46256 - protein, 10 aa, Homo sapiens
AINGNPSWHL

SEQ ID NO: 46257 - protein, 10 aa, Homo sapiens
WMATYLNDHL

SEQ ID NO: 46258 - protein, 10 aa, Homo sapiens
TAYQSFEQVV

SEQ ID NO: 46259 - protein, 10 aa, Homo sapiens
VLVSRIAAWM

SEQ ID NO: 46260 - protein, 10 aa, Homo sapiens
FFSFGGALCV

SEQ ID NO: 46261 - protein, 10 aa, Homo sapiens
VLLGSLFSRK

SEQ ID NO: 46262 - protein, 10 aa, Homo sapiens
RAFSDLTSQL

SEQ ID NO: 46263 - protein, 10 aa, Homo sapiens
GTAYQSFEQV

SEQ ID NO: 46264 - protein, 10 aa, Homo sapiens
FLTGMTVAGV

SEQ ID NO: 46265 - protein, 10 aa, Homo sapiens
YLNDHLEPWI

SEQ ID NO: 46266 - protein, 10 aa, Homo sapiens
SVDKEMQVLV

SEQ ID NO: 46267 - protein, 10 aa, Homo sapiens
WMATYLNDHL

SEQ ID NO: 46268 - protein, 10 aa, Homo sapiens
VVNELFRDGV

SEQ ID NO: 46269 - protein, 10 aa, Homo sapiens
LVVDFLSYKL

SEQ ID NO: 46270 - protein, 10 aa, Homo sapiens
VLVSRIAAWM

SEQ ID NO: 46271 - protein, 10 aa, Homo sapiens
SLDAREVIPM

SEQ ID NO: 46272 - protein, 10 aa, Homo sapiens
AINGNPSWHL

SEQ ID NO: 46273 - protein, 10 aa, Homo sapiens
RIAAWMATYL

SEQ ID NO: 46274 - protein, 10 aa, Homo sapiens
FFSFGGALCV

SEQ ID NO: 46275 - protein, 10 aa, Homo sapiens
VLLGSLFSRK

SEQ ID NO: 46276 - protein, 10 aa, Homo sapiens
TAYQSFEQVV

SEQ ID NO: 46277 - protein, 10 aa, Homo sapiens
ELYGNNAAAE

SEQ ID NO: 46278 - protein, 10 aa, Homo sapiens
GMTVAGVVLL

SEQ ID NO: 46279 - protein, 10 aa, Homo sapiens
FLTGMTVAGV

SEQ ID NO: 46280 - protein, 10 aa, Homo sapiens
YLNDHLEPWI

SEQ ID NO: 46281 - protein, 10 aa, Homo sapiens
SVDKEMQVLV

SEQ ID NO: 46282 - protein, 10 aa, Homo sapiens
WMATYLNDHL

SEQ ID NO: 46283 - protein, 10 aa, Homo sapiens
RIAAWMATYL

SEQ ID NO: 46284 - protein, 10 aa, Homo sapiens
AINGNPSWHL

SEQ ID NO: 46285 - protein, 10 aa, Homo sapiens
VLVSRIAAWM

SEQ ID NO: 46286 - protein, 10 aa, Homo sapiens
LVVDFLSYKL

SEQ ID NO: 46287 - protein, 10 aa, Homo sapiens
SLDAREVIPM

SEQ ID NO: 46288 - protein, 10 aa, Homo sapiens
GMTVAGVVLL

SEQ ID NO: 46289 - protein, 10 aa, Homo sapiens
TAYQSFEQVV

SEQ ID NO: 46290 - protein, 10 aa, Homo sapiens
FFSFGGALCV

SEQ ID NO: 46291 - protein, 10 aa, Homo sapiens
GTAYQSFEQV

SEQ ID NO: 46292 - protein, 10 aa, Homo sapiens
FLTGMTVAGV

SEQ ID NO: 46293 - protein, 10 aa, Homo sapiens
YLNDHLEPWI

SEQ ID NO: 46294 - protein, 10 aa, Homo sapiens
WMATYLNDHL

SEQ ID NO: 46295 - protein, 10 aa, Homo sapiens
AINGNPSWHL

SEQ ID NO: 46296 - protein, 10 aa, Homo sapiens
LVVDFLSYKL

SEQ ID NO: 46297 - protein, 10 aa, Homo sapiens
SVDKEMQVLV

SEQ ID NO: 46298 - protein, 10 aa, Homo sapiens
RIAAWMATYL

SEQ ID NO: 46299 - protein, 10 aa, Homo sapiens
SLDAREVIPM

SEQ ID NO: 46300 - protein, 10 aa, Homo sapiens
VLVSRIAAWM

SEQ ID NO: 46301 - protein, 10 aa, Homo sapiens
VLLGSLFSRK

SEQ ID NO: 46302 - protein, 10 aa, Homo sapiens
ELVVDFLSYK

SEQ ID NO: 46303 - protein, 10 aa, Homo sapiens
GALCVESVDK

SEQ ID NO: 46304 - protein, 10 aa, Homo sapiens
VVLLGSLFSR

SEQ ID NO: 46305 - protein, 10 aa, Homo sapiens
REVIPMAAVK

SEQ ID NO: 46306 - protein, 10 aa, Homo sapiens
VLLGSLFSRK

SEQ ID NO: 46307 - protein, 10 aa, Homo sapiens
VVLLGSLFSR

SEQ ID NO: 46308 - protein, 10 aa, Homo sapiens
GALCVESVDK

SEQ ID NO: 46309 - protein, 10 aa, Homo sapiens
SQFSDVEENR

SEQ ID NO: 46310 - protein, 10 aa, Homo sapiens
SFEQVVNELF

SEQ ID NO: 46311 - protein, 10 aa, Homo sapiens
TYLNDHLEPW

SEQ ID NO: 46312 - protein, 10 aa, Homo sapiens
SFEQVVNELF

SEQ ID NO: 46313 - protein, 10 aa, Homo sapiens
TYLNDHLEPW

SEQ ID NO: 46314 - protein, 10 aa, Homo sapiens
ITPGTAYQSF

SEQ ID NO: 46315 - protein, 10 aa, Homo sapiens
TYLNDHLEPW

SEQ ID NO: 46316 - protein, 10 aa, Homo sapiens
SFEQVVNELF

SEQ ID NO: 46317 - protein, 10 aa, Homo sapiens
ITPGTAYQSF

SEQ ID NO: 46318 - protein, 10 aa, Homo sapiens
EAPEGTESEM

SEQ ID NO: 46319 - protein, 10 aa, Homo sapiens
RIAAWMATYL

SEQ ID NO: 46320 - protein, 10 aa, Homo sapiens
ITPGTAYQSF

SEQ ID NO: 46321 - protein, 10 aa, Homo sapiens
VLVSRIAAWM

SEQ ID NO: 46322 - protein, 10 aa, Homo sapiens
EAPEGTESEM

SEQ ID NO: 46323 - protein, 10 aa, Homo sapiens
ESVDKEMQVL

SEQ ID NO: 46324 - protein, 10 aa, Homo sapiens
EFELRYRRAF

SEQ ID NO: 46325 - protein, 10 aa, Homo sapiens
QLHITPGTAY

SEQ ID NO: 46326 - protein, 10 aa, Homo sapiens
VVLLGSLFSR

SEQ ID NO: 46327 - protein, 10 aa, Homo sapiens
LFRDGVNWGR

SEQ ID NO: 46328 - protein, 10 aa, Homo sapiens
SRKGQERFNR

SEQ ID NO: 46329 - protein, 10 aa, Homo sapiens
PMAAVKQALR

SEQ ID NO: 46330 - protein, 10 aa, Homo sapiens
VVLLGSLFSR

SEQ ID NO: 46331 - protein, 10 aa, Homo sapiens
LFRDGVNWGR

SEQ ID NO: 46332 - protein, 10 aa, Homo sapiens
DFLSYKLSQK

SEQ ID NO: 46333 - protein, 10 aa, Homo sapiens
ELVVDFLSYK

SEQ ID NO: 46334 - protein, 10 aa, Homo sapiens
SQFSDVEENR

SEQ ID NO: 46335 - protein, 10 aa, Homo sapiens
VVLLGSLFSR

SEQ ID NO: 46336 - protein, 10 aa, Homo sapiens
YGNNAAAESR

SEQ ID NO: 46337 - protein, 10 aa, Homo sapiens
EVIPMAAVKQ

SEQ ID NO: 46338 - protein, 10 aa, Homo sapiens
MATYLNDHLE

SEQ ID NO: 46339 - protein, 10 aa, Homo sapiens
IVAFFSFGGA

SEQ ID NO: 46340 - protein, 10 aa, Homo sapiens
GTAYQSFEQV

SEQ ID NO: 46341 - protein, 10 aa, Homo sapiens
LVVDFLSYKL

SEQ ID NO: 46342 - protein, 10 aa, Homo sapiens
QSFEQVVNEL

SEQ ID NO: 46343 - protein, 10 aa, Homo sapiens
FLTGMTVAGV

SEQ ID NO: 46344 - protein, 10 aa, Homo sapiens
TAYQSFEQVV

SEQ ID NO: 46345 - protein, 10 aa, Homo sapiens
RIAAWMATYL

SEQ ID NO: 46346 - protein, 10 aa, Homo sapiens
NGATGHSSSL

SEQ ID NO: 46347 - protein, 10 aa, Homo sapiens
TVAGVVLLGS

SEQ ID NO: 46348 - protein, 10 aa, Homo sapiens
FGGALCVESV

SEQ ID NO: 46349 - protein, 10 aa, Homo sapiens
VVNELFRDGV

SEQ ID NO: 46350 - protein, 10 aa, Homo sapiens
LVSRIAAWMA

SEQ ID NO: 46351 - protein, 10 aa, Homo sapiens
TGMTVAGVVL

SEQ ID NO: 46352 - protein, 10 aa, Homo sapiens
SVDKEMQVLV

SEQ ID NO: 46353 - protein, 10 aa, Homo sapiens
FLTGMTVAGV

SEQ ID NO: 46354 - protein, 10 aa, Homo sapiens
TAYQSFEQVV

SEQ ID NO: 46355 - protein, 10 aa, Homo sapiens
LVVDFLSYKL

SEQ ID NO: 46356 - protein, 10 aa, Homo sapiens
RIAAWMATYL

SEQ ID NO: 46357 - protein, 10 aa, Homo sapiens
GTAYQSFEQV

SEQ ID NO: 46358 - protein, 10 aa, Homo sapiens
IPMAAVKQAL

SEQ ID NO: 46359 - protein, 10 aa, Homo sapiens
SQKGYSWSQF

SEQ ID NO: 46360 - protein, 10 aa, Homo sapiens
QLHITPGTAY

SEQ ID NO: 46361 - protein, 10 aa, Homo sapiens
GVNWGRIVAF

SEQ ID NO: 46362 - protein, 10 aa, Homo sapiens
IQENGGWDTF

SEQ ID NO: 46363 - protein, 10 aa, Homo sapiens
LSYKLSQKGY

SEQ ID NO: 46364 - protein, 10 aa, Homo sapiens
RELVVDFLSY

SEQ ID NO: 46365 - protein, 10 aa, Homo sapiens
SRIAAWMATY

SEQ ID NO: 46366 - protein, 10 aa, Homo sapiens
RRAFSDLTSQ

SEQ ID NO: 46367 - protein, 10 aa, Homo sapiens
IPMAAVKQAL

SEQ ID NO: 46368 - protein, 10 aa, Homo sapiens
EPWIQENGGW

SEQ ID NO: 46369 - protein, 10 aa, Homo sapiens
EAGDEFELRY

SEQ ID NO: 46370 - protein, 10 aa, Homo sapiens
EAPEGTESEM

SEQ ID NO: 46371 - protein, 10 aa, Homo sapiens
QALREAGDEF

SEQ ID NO: 46372 - protein, 10 aa, Homo sapiens
SPAVNGATGH

SEQ ID NO: 46373 - protein, 10 aa, Homo sapiens
TPSAINGNPS

SEQ ID NO: 46374 - protein, 10 aa, Homo sapiens
GVNWGRIVAF

SEQ ID NO: 46375 - protein, 10 aa, Homo sapiens
VAFFSFGGAL

SEQ ID NO: 46376 - protein, 10 aa, Homo sapiens
FVELYGNNAA

SEQ ID NO: 46377 - protein, 10 aa, Homo sapiens
AESRKGQERF

SEQ ID NO: 46378 - protein, 10 aa, Homo sapiens
EPWIQENGGW

SEQ ID NO: 46379 - protein, 10 aa, Homo sapiens
QSNRELVVDF

SEQ ID NO: 46380 - protein, 10 aa, Homo sapiens
QVLVSRIAAW

SEQ ID NO: 46381 - protein, 10 aa, Homo sapiens
PSAINGNPSW

SEQ ID NO: 46382 - protein, 11 aa, Homo sapiens
FLTGMTVAGVV

SEQ ID NO: 46383 - protein, 11 aa, Homo sapiens
SLDAREVIPMA

SEQ ID NO: 46384 - protein, 11 aa, Homo sapiens
VLVSRIAAWMA

SEQ ID NO: 46385 - protein, 11 aa, Homo sapiens
HLADSPAVNGA

SEQ ID NO: 46386 - protein, 11 aa, Homo sapiens
YLNDHLEPWIQ

SEQ ID NO: 46387 - protein, 11 aa, Homo sapiens
ALREAGDEFEL

SEQ ID NO: 46388 - protein, 11 aa, Homo sapiens
YQSFEQVVNEL

SEQ ID NO: 46389 - protein, 11 aa, Homo sapiens
HLADSPAVNGA

SEQ ID NO: 46390 - protein, 11 aa, Homo sapiens
FLTGMTVAGVV

SEQ ID NO: 46391 - protein, 11 aa, Homo sapiens
YQSFEQVVNEL

SEQ ID NO: 46392 - protein, 11 aa, Homo sapiens
ALREAGDEFEL

SEQ ID NO: 46393 - protein, 11 aa, Homo sapiens
YLNDHLEPWIQ

SEQ ID NO: 46394 - protein, 11 aa, Homo sapiens
IVAFFSFGGAL

SEQ ID NO: 46395 - protein, 11 aa, Homo sapiens
TVAGVVLLGSL

SEQ ID NO: 46396 - protein, 11 aa, Homo sapiens
VLVSRIAAWMA

SEQ ID NO: 46397 - protein, 11 aa, Homo sapiens
KLSQKGYSWSQ

SEQ ID NO: 46398 - protein, 11 aa, Homo sapiens
ELVVDFLSYKL

SEQ ID NO: 46399 - protein, 11 aa, Homo sapiens
SLDAREVIPMA

SEQ ID NO: 46400 - protein, 11 aa, Homo sapiens
FLTGMTVAGVV

SEQ ID NO: 46401 - protein, 11 aa, Homo sapiens
HLADSPAVNGA

SEQ ID NO: 46402 - protein, 11 aa, Homo sapiens
RIVAFFSFGGA

SEQ ID NO: 46403 - protein, 11 aa, Homo sapiens
VLVSRIAAWMA

SEQ ID NO: 46404 - protein, 11 aa, Homo sapiens
TVAGVVLLGSL

SEQ ID NO: 46405 - protein, 11 aa, Homo sapiens
ALREAGDEFEL

SEQ ID NO: 46406 - protein, 11 aa, Homo sapiens
YQSFEQVVNEL

SEQ ID NO: 46407 - protein, 11 aa, Homo sapiens
YLNDHLEPWIQ

SEQ ID NO: 46408 - protein, 11 aa, Homo sapiens
AINGNPSWHLA

SEQ ID NO: 46409 - protein, 11 aa, Homo sapiens
FNRWFLTGMTV

SEQ ID NO: 46410 - protein, 11 aa, Homo sapiens
IVAFFSFGGAL

SEQ ID NO: 46411 - protein, 11 aa, Homo sapiens
SLDAREVIPMA

SEQ ID NO: 46412 - protein, 11 aa, Homo sapiens
MAAVKQALREA

SEQ ID NO: 46413 - protein, 11 aa, Homo sapiens
QVVNELFRDGV

SEQ ID NO: 46414 - protein, 11 aa, Homo sapiens
FLTGMTVAGVV

SEQ ID NO: 46415 - protein, 11 aa, Homo sapiens
ALREAGDEFEL

SEQ ID NO: 46416 - protein, 11 aa, Homo sapiens
VLVSRIAAWMA

SEQ ID NO: 46417 - protein, 11 aa, Homo sapiens
YLNDHLEPWIQ

SEQ ID NO: 46418 - protein, 11 aa, Homo sapiens
SLDAREVIPMA

SEQ ID NO: 46419 - protein, 11 aa, Homo sapiens
FLTGMTVAGVV

SEQ ID NO: 46420 - protein, 11 aa, Homo sapiens
RIVAFFSFGGA

SEQ ID NO: 46421 - protein, 11 aa, Homo sapiens
IQENGGWDTFV

SEQ ID NO: 46422 - protein, 11 aa, Homo sapiens
YQSFEQVVNEL

SEQ ID NO: 46423 - protein, 11 aa, Homo sapiens
SAINGNPSWHL

SEQ ID NO: 46424 - protein, 11 aa, Homo sapiens
QVVNELFRDGV

SEQ ID NO: 46425 - protein, 11 aa, Homo sapiens
VLVSRIAAWMA

SEQ ID NO: 46426 - protein, 11 aa, Homo sapiens
KQALREAGDEF

SEQ ID NO: 46427 - protein, 11 aa, Homo sapiens
HLADSPAVNGA

SEQ ID NO: 46428 - protein, 11 aa, Homo sapiens
TVAGVVLLGSL

SEQ ID NO: 46429 - protein, 11 aa, Homo sapiens
ALREAGDEFEL

SEQ ID NO: 46430 - protein, 11 aa, Homo sapiens
SQLHITPGTAY

SEQ ID NO: 46431 - protein, 11 aa, Homo sapiens
FLTGMTVAGVV

SEQ ID NO: 46432 - protein, 11 aa, Homo sapiens
SLDAREVIPMA

SEQ ID NO: 46433 - protein, 11 aa, Homo sapiens
YLNDHLEPWIQ

SEQ ID NO: 46434 - protein, 11 aa, Homo sapiens
ALREAGDEFEL

SEQ ID NO: 46435 - protein, 11 aa, Homo sapiens
HLADSPAVNGA

SEQ ID NO: 46436 - protein, 11 aa, Homo sapiens
VLVSRIAAWMA

SEQ ID NO: 46437 - protein, 11 aa, Homo sapiens
KLSQKGYSWSQ

SEQ ID NO: 46438 - protein, 11 aa, Homo sapiens
ELVVDFLSYKL

SEQ ID NO: 46439 - protein, 11 aa, Homo sapiens
TVAGVVLLGSL

SEQ ID NO: 46440 - protein, 11 aa, Homo sapiens
AINGNPSWHLA

SEQ ID NO: 46441 - protein, 11 aa, Homo sapiens
WFLTGMTVAGV

SEQ ID NO: 46442 - protein, 11 aa, Homo sapiens
AFFSFGGALCV

SEQ ID NO: 46443 - protein, 11 aa, Homo sapiens
SFGGALCVESV

SEQ ID NO: 46444 - protein, 11 aa, Homo sapiens
VIPMAAVKQAL

SEQ ID NO: 46445 - protein, 11 aa, Homo sapiens
QVVNELFRDGV

SEQ ID NO: 46446 - protein, 11 aa, Homo sapiens
FRDGVNWGRIV

SEQ ID NO: 46447 - protein, 11 aa, Homo sapiens
SAINGNPSWHL

SEQ ID NO: 46448 - protein, 11 aa, Homo sapiens
ELYGNNAAAES

SEQ ID NO: 46449 - protein, 11 aa, Homo sapiens
CVESVDKEMQV

SEQ ID NO: 46450 - protein, 11 aa, Homo sapiens
GTAYQSFEQVV

SEQ ID NO: 46451 - protein, 11 aa, Homo sapiens
IVAFFSFGGAL

SEQ ID NO: 46452 - protein, 11 aa, Homo sapiens
FLTGMTVAGVV

SEQ ID NO: 46453 - protein, 11 aa, Homo sapiens
YLNDHLEPWIQ

SEQ ID NO: 46454 - protein, 11 aa, Homo sapiens
ALREAGDEFEL

SEQ ID NO: 46455 - protein, 11 aa, Homo sapiens
SLDAREVIPMA

SEQ ID NO: 46456 - protein, 11 aa, Homo sapiens
HLADSPAVNGA

SEQ ID NO: 46457 - protein, 11 aa, Homo sapiens
VLVSRIAAWMA

SEQ ID NO: 46458 - protein, 11 aa, Homo sapiens
VIPMAAVKQAL

SEQ ID NO: 46459 - protein, 11 aa, Homo sapiens
KLSQKGYSWSQ

SEQ ID NO: 46460 - protein, 11 aa, Homo sapiens
WFLTGMTVAGV

SEQ ID NO: 46461 - protein, 11 aa, Homo sapiens
ELVVDFLSYKL

SEQ ID NO: 46462 - protein, 11 aa, Homo sapiens
FRDGVNWGRIV

SEQ ID NO: 46463 - protein, 11 aa, Homo sapiens
FLTGMTVAGVV

SEQ ID NO: 46464 - protein, 11 aa, Homo sapiens
ALREAGDEFEL

SEQ ID NO: 46465 - protein, 11 aa, Homo sapiens
SLDAREVIPMA

SEQ ID NO: 46466 - protein, 11 aa, Homo sapiens
VLVSRIAAWMA

SEQ ID NO: 46467 - protein, 11 aa, Homo sapiens
CVESVDKEMQV

SEQ ID NO: 46468 - protein, 11 aa, Homo sapiens
HLADSPAVNGA

SEQ ID NO: 46469 - protein, 11 aa, Homo sapiens
SFGGALCVESV

SEQ ID NO: 46470 - protein, 11 aa, Homo sapiens
YLNDHLEPWIQ

SEQ ID NO: 46471 - protein, 11 aa, Homo sapiens
KLSQKGYSWSQ

SEQ ID NO: 46472 - protein, 11 aa, Homo sapiens
ELVVDFLSYKL

SEQ ID NO: 46473 - protein, 11 aa, Homo sapiens
TVAGVVLLGSL

SEQ ID NO: 46474 - protein, 11 aa, Homo sapiens
AFFSFGGALCV

SEQ ID NO: 46475 - protein, 11 aa, Homo sapiens
IQENGGWDTFV

SEQ ID NO: 46476 - protein, 11 aa, Homo sapiens
QVVNELFRDGV

SEQ ID NO: 46477 - protein, 11 aa, Homo sapiens
VIPMAAVKQAL

SEQ ID NO: 46478 - protein, 11 aa, Homo sapiens
ELYGNNAAAES

SEQ ID NO: 46479 - protein, 11 aa, Homo sapiens
SAINGNPSWHL

SEQ ID NO: 46480 - protein, 11 aa, Homo sapiens
WFLTGMTVAGV

SEQ ID NO: 46481 - protein, 11 aa, Homo sapiens
AINGNPSWHLA

SEQ ID NO: 46482 - protein, 11 aa, Homo sapiens
FLTGMTVAGVV

SEQ ID NO: 46483 - protein, 11 aa, Homo sapiens
HLADSPAVNGA

SEQ ID NO: 46484 - protein, 11 aa, Homo sapiens
YLNDHLEPWIQ

SEQ ID NO: 46485 - protein, 11 aa, Homo sapiens
SLDAREVIPMA

SEQ ID NO: 46486 - protein, 11 aa, Homo sapiens
ALREAGDEFEL

SEQ ID NO: 46487 - protein, 11 aa, Homo sapiens
WFLTGMTVAGV

SEQ ID NO: 46488 - protein, 11 aa, Homo sapiens
VLVSRIAAWMA

SEQ ID NO: 46489 - protein, 11 aa, Homo sapiens
VVLLGSLFSRK

SEQ ID NO: 46490 - protein, 11 aa, Homo sapiens
VVLLGSLFSRK

SEQ ID NO: 46491 - protein, 11 aa, Homo sapiens
GVVLLGSLFSR

SEQ ID NO: 46492 - protein, 11 aa, Homo sapiens
ATGHSSSLDAR

SEQ ID NO: 46493 - protein, 11 aa, Homo sapiens
RELVVDFLSYK

SEQ ID NO: 46494 - protein, 11 aa, Homo sapiens
NWGRIVAFFSF

SEQ ID NO: 46495 - protein, 11 aa, Homo sapiens
TYLNDHLEPWI

SEQ ID NO: 46496 - protein, 11 aa, Homo sapiens
AWMATYLNDHL

SEQ ID NO: 46497 - protein, 11 aa, Homo sapiens
SYKLSQKGYSW

SEQ ID NO: 46498 - protein, 11 aa, Homo sapiens
NWGRIVAFFSF

SEQ ID NO: 46499 - protein, 11 aa, Homo sapiens
TYLNDHLEPWI

SEQ ID NO: 46500 - protein, 11 aa, Homo sapiens
AWMATYLNDHL

SEQ ID NO: 46501 - protein, 11 aa, Homo sapiens
TYLNDHLEPWI

SEQ ID NO: 46502 - protein, 11 aa, Homo sapiens
AWMATYLNDHL

SEQ ID NO: 46503 - protein, 11 aa, Homo sapiens
SYKLSQKGYSW

SEQ ID NO: 46504 - protein, 11 aa, Homo sapiens
HITPGTAYQSF

SEQ ID NO: 46505 - protein, 11 aa, Homo sapiens
QVLVSRIAAWM

SEQ ID NO: 46506 - protein, 11 aa, Homo sapiens
HITPGTAYQSF

SEQ ID NO: 46507 - protein, 11 aa, Homo sapiens
WIQENGGWDTF

SEQ ID NO: 46508 - protein, 11 aa, Homo sapiens
FLSYKLSQKGY

SEQ ID NO: 46509 - protein, 11 aa, Homo sapiens
DGVNWGRIVAF

SEQ ID NO: 46510 - protein, 11 aa, Homo sapiens
TVAGVVLLGSL

SEQ ID NO: 46511 - protein, 11 aa, Homo sapiens
SQLHITPGTAY

SEQ ID NO: 46512 - protein, 11 aa, Homo sapiens
VVLLGSLFSRK

SEQ ID NO: 46513 - protein, 11 aa, Homo sapiens
RYRRAFSDLTS

SEQ ID NO: 46514 - protein, 11 aa, Homo sapiens
GVVLLGSLFSR

SEQ ID NO: 46515 - protein, 11 aa, Homo sapiens
SFEQVVNELFR

SEQ ID NO: 46516 - protein, 11 aa, Homo sapiens
ESRKGQERFNR

SEQ ID NO: 46517 - protein, 11 aa, Homo sapiens
ATGHSSSLDAR

SEQ ID NO: 46518 - protein, 11 aa, Homo sapiens
RELVVDFLSYK

SEQ ID NO: 46519 - protein, 11 aa, Homo sapiens
LYGNNAAAESR

SEQ ID NO: 46520 - protein, 11 aa, Homo sapiens
ESRKGQERFNR

SEQ ID NO: 46521 - protein, 11 aa, Homo sapiens
ELFRDGVNWGR

SEQ ID NO: 46522 - protein, 11 aa, Homo sapiens
EAGDEFELRYR

SEQ ID NO: 46523 - protein, 11 aa, Homo sapiens
SFEQVVNELFR

SEQ ID NO: 46524 - protein, 11 aa, Homo sapiens
GVVLLGSLFSR

SEQ ID NO: 46525 - protein, 11 aa, Homo sapiens
EFELRYRRAFS

SEQ ID NO: 46526 - protein, 11 aa, Homo sapiens
ELFRDGVNWGR

SEQ ID NO: 46527 - protein, 11 aa, Homo sapiens
WSQFSDVEENR

SEQ ID NO: 46528 - protein, 11 aa, Homo sapiens
ESRKGQERFNR

SEQ ID NO: 46529 - protein, 11 aa, Homo sapiens
EAGDEFELRYR

SEQ ID NO: 46530 - protein, 11 aa, Homo sapiens
GVVLLGSLFSR

SEQ ID NO: 46531 - protein, 11 aa, Homo sapiens
IPMAAVKQALR

SEQ ID NO: 46532 - protein, 11 aa, Homo sapiens
SFEQVVNELFR

SEQ ID NO: 46533 - protein, 11 aa, Homo sapiens
TVAGVVLLGSL

SEQ ID NO: 46534 - protein, 11 aa, Homo sapiens
QVVNELFRDGV

SEQ ID NO: 46535 - protein, 11 aa, Homo sapiens
IVAFFSFGGAL

SEQ ID NO: 46536 - protein, 11 aa, Homo sapiens
ESVDKEMQVLV

SEQ ID NO: 46537 - protein, 11 aa, Homo sapiens
TGMTVAGVVLL

SEQ ID NO: 46538 - protein, 11 aa, Homo sapiens
ELVVDFLSYKL

SEQ ID NO: 46539 - protein, 11 aa, Homo sapiens
RIVAFFSFGGA

SEQ ID NO: 46540 - protein, 11 aa, Homo sapiens
DTFVELYGNNA

SEQ ID NO: 46541 - protein, 11 aa, Homo sapiens
EVIPMAAVKQA

SEQ ID NO: 46542 - protein, 11 aa, Homo sapiens
GTAYQSFEQVV

SEQ ID NO: 46543 - protein, 11 aa, Homo sapiens
DAREVIPMAAV

SEQ ID NO: 46544 - protein, 11 aa, Homo sapiens
HLADSPAVNGA

SEQ ID NO: 46545 - protein, 11 aa, Homo sapiens
MTVAGVVLLGS

SEQ ID NO: 46546 - protein, 11 aa, Homo sapiens
ETPSAINGNPS

SEQ ID NO: 46547 - protein, 11 aa, Homo sapiens
FLTGMTVAGVV

SEQ ID NO: 46548 - protein, 11 aa, Homo sapiens
HSSSLDAREVI

SEQ ID NO: 46549 - protein, 11 aa, Homo sapiens
SAINGNPSWHL

SEQ ID NO: 46550 - protein, 11 aa, Homo sapiens
DAREVIPMAAV

SEQ ID NO: 46551 - protein, 11 aa, Homo sapiens
ESVDKEMQVLV

SEQ ID NO: 46552 - protein, 11 aa, Homo sapiens
HLADSPAVNGA

SEQ ID NO: 46553 - protein, 11 aa, Homo sapiens
PSWHLADSPAV

SEQ ID NO: 46554 - protein, 11 aa, Homo sapiens
WFLTGMTVAGV

SEQ ID NO: 46555 - protein, 11 aa, Homo sapiens
EVIPMAAVKQA

SEQ ID NO: 46556 - protein, 11 aa, Homo sapiens
ELVVDFLSYKL

SEQ ID NO: 46557 - protein, 11 aa, Homo sapiens
TVAGVVLLGSL

SEQ ID NO: 46558 - protein, 11 aa, Homo sapiens
DTFVELYGNNA

SEQ ID NO: 46559 - protein, 11 aa, Homo sapiens
IVAFFSFGGAL

SEQ ID NO: 46560 - protein, 11 aa, Homo sapiens
NPSWHLADSPA

SEQ ID NO: 46561 - protein, 11 aa, Homo sapiens
SPAVNGATGHS

SEQ ID NO: 46562 - protein, 11 aa, Homo sapiens
SQLHITPGTAY

SEQ ID NO: 46563 - protein, 11 aa, Homo sapiens
KQALREAGDEF

SEQ ID NO: 46564 - protein, 11 aa, Homo sapiens
SQSNRELVVDF

SEQ ID NO: 46565 - protein, 11 aa, Homo sapiens
YQSFEQVVNEL

SEQ ID NO: 46566 - protein, 11 aa, Homo sapiens
MQVLVSRIAAW

SEQ ID NO: 46567 - protein, 11 aa, Homo sapiens
VSRIAAWMATY

SEQ ID NO: 46568 - protein, 11 aa, Homo sapiens
FLSYKLSQKGY

SEQ ID NO: 46569 - protein, 11 aa, Homo sapiens
WIQENGGWDTF

SEQ ID NO: 46570 - protein, 11 aa, Homo sapiens
QSFEQVVNELF

SEQ ID NO: 46571 - protein, 11 aa, Homo sapiens
HITPGTAYQSF

SEQ ID NO: 46572 - protein, 11 aa, Homo sapiens
GVNWGRIVAFF

SEQ ID NO: 46573 - protein, 11 aa, Homo sapiens
DEFELRYRRAF

SEQ ID NO: 46574 - protein, 11 aa, Homo sapiens
REAGDEFELRY

SEQ ID NO: 46575 - protein, 11 aa, Homo sapiens
SQLHITPGTAY

SEQ ID NO: 46576 - protein, 11 aa, Homo sapiens
VESVDKEMQVL

SEQ ID NO: 46577 - protein, 11 aa, Homo sapiens
LEPWIQENGGW

SEQ ID NO: 46578 - protein, 11 aa, Homo sapiens
FNRWFLTGMTV

SEQ ID NO: 46579 - protein, 11 aa, Homo sapiens
RRAFSDLTSQL

SEQ ID NO: 46580 - protein, 11 aa, Homo sapiens
SRIAAWMATYL

SEQ ID NO: 46581 - protein, 11 aa, Homo sapiens
NPSWHLADSPA

SEQ ID NO: 46582 - protein, 11 aa, Homo sapiens
TPSAINGNPSW

SEQ ID NO: 46583 - protein, 11 aa, Homo sapiens
WIQENGGWDTF

SEQ ID NO: 46584 - protein, 11 aa, Homo sapiens
DGVNWGRIVAF

SEQ ID NO: 46585 - protein, 11 aa, Homo sapiens
YQSFEQVVNEL

SEQ ID NO: 46586 - protein, 11 aa, Homo sapiens
VESVDKEMQVL

SEQ ID NO: 46587 - protein, 11 aa, Homo sapiens
TESEMETPSAI

SEQ ID NO: 46588 - protein, 11 aa, Homo sapiens
EENRTEAPEGT

SEQ ID NO: 46589 - protein, 11 aa, Homo sapiens
TPSAINGNPSW

SEQ ID NO: 46590 - protein, 11 aa, Homo sapiens
NPSWHLADSPA

SEQ ID NO: 46591 - protein, 11 aa, Homo sapiens
ATYLNDHLEPW

SEQ ID NO: 46592 - protein, 11 aa, Homo sapiens
ATYLNDHLEPW

SEQ ID NO: 46593 - protein, 11 aa, Homo sapiens
QSFEQVVNELF

SEQ ID NO: 46594 - protein, 15 aa, Homo sapiens
DFSWLSLKTLLSLAL

SEQ ID NO: 46595 - protein, 9 aa, Homo sapiens
WLSLKTLLS

SEQ ID NO: 46596 - protein, 15 aa, Homo sapiens
FSWLSLKTLLSLALV

SEQ ID NO: 46597 - protein, 9 aa, Homo sapiens
LKTLLSLAL

SEQ ID NO: 46598 - protein, 15 aa, Homo sapiens
WLSLKTLLSLALVGA

SEQ ID NO: 46599 - protein, 9 aa, Homo sapiens
LKTLLSLAL

SEQ ID NO: 46600 - protein, 15 aa, Homo sapiens
LSLKTLLSLALVGAC

SEQ ID NO: 46601 - protein, 9 aa, Homo sapiens
LKTLLSLAL

SEQ ID NO: 46602 - protein, 15 aa, Homo sapiens
SWLSLKTLLSLALVG

SEQ ID NO: 46603 - protein, 9 aa, Homo sapiens
LKTLLSLAL

SEQ ID NO: 46604 - protein, 15 aa, Homo sapiens
SLKTLLSLALVGACI

SEQ ID NO: 46605 - protein, 9 aa, Homo sapiens
LKTLLSLAL

SEQ ID NO: 46606 - protein, 15 aa, Homo sapiens
LKTLLSLALVGACIT

SEQ ID NO: 46607 - protein, 9 aa, Homo sapiens
LKTLLSLAL

SEQ ID NO: 46608 - protein, 15 aa, Homo sapiens
RTSPLQTPAAPGAAA

SEQ ID NO: 46609 - protein, 9 aa, Homo sapiens
LQTPAAPGA

SEQ ID NO: 46610 - protein, 15 aa, Homo sapiens
TSPLQTPAAPGAAAG

SEQ ID NO: 46611 - protein, 9 aa, Homo sapiens
LQTPAAPGA

SEQ ID NO: 46612 - protein, 15 aa, Homo sapiens
SPLQTPAAPGAAAGP

SEQ ID NO: 46613 - protein, 9 aa, Homo sapiens
LQTPAAPGA

SEQ ID NO: 46614 - protein, 15 aa, Homo sapiens
VARTSPLQTPAAPGA

SEQ ID NO: 46615 - protein, 9 aa, Homo sapiens
TSPLQTPAA

SEQ ID NO: 46616 - protein, 15 aa, Homo sapiens
ARTSPLQTPAAPGAA

SEQ ID NO: 46617 - protein, 9 aa, Homo sapiens
LQTPAAPGA

SEQ ID NO: 46618 - protein, 15 aa, Homo sapiens
LFDFSWLSLKTLLSL

SEQ ID NO: 46619 - protein, 9 aa, Homo sapiens
WLSLKTLLS

SEQ ID NO: 46620 - protein, 15 aa, Homo sapiens
PLFDFSWLSLKTLLS

SEQ ID NO: 46621 - protein, 9 aa, Homo sapiens
FSWLSLKTL

SEQ ID NO: 46622 - protein, 15 aa, Homo sapiens
FDFSWLSLKTLLSLA

SEQ ID NO: 46623 - protein, 9 aa, Homo sapiens
WLSLKTLLS

SEQ ID NO: 46624 - protein, 15 aa, Homo sapiens
TLLSLALVGACITLG

SEQ ID NO: 46625 - protein, 9 aa, Homo sapiens
LLSLALVGA

SEQ ID NO: 46626 - protein, 15 aa, Homo sapiens
LLSLALVGACITLGA

SEQ ID NO: 46627 - protein, 9 aa, Homo sapiens
LVGACITLG

SEQ ID NO: 46628 - protein, 15 aa, Homo sapiens
LALVGACITLGAYLG

SEQ ID NO: 46629 - protein, 9 aa, Homo sapiens
LVGACITLG

SEQ ID NO: 46630 - protein, 15 aa, Homo sapiens
LSLALVGACITLGAY

SEQ ID NO: 46631 - protein, 9 aa, Homo sapiens
LVGACITLG

SEQ ID NO: 46632 - protein, 15 aa, Homo sapiens
SLALVGACITLGAYL

SEQ ID NO: 46633 - protein, 9 aa, Homo sapiens
LVGACITLG

SEQ ID NO: 46634 - protein, 15 aa, Homo sapiens
RRYRRDFAEMSSQLH

SEQ ID NO: 46635 - protein, 9 aa, Homo sapiens
YRRDFAEMS

SEQ ID NO: 46636 - protein, 15 aa, Homo sapiens
LQTPAAPGAAAGPAL

SEQ ID NO: 46637 - protein, 9 aa, Homo sapiens
LQTPAAPGA

SEQ ID NO: 46638 - protein, 15 aa, Homo sapiens
PLQTPAAPGAAAGPA

SEQ ID NO: 46639 - protein, 9 aa, Homo sapiens
LQTPAAPGA

SEQ ID NO: 46640 - protein, 15 aa, Homo sapiens
YRRDFAEMSSQLHLT

SEQ ID NO: 46641 - protein, 9 aa, Homo sapiens
FAEMSSQLH

SEQ ID NO: 46642 - protein, 15 aa, Homo sapiens
RYRRDFAEMSSQLHL

SEQ ID NO: 46643 - protein, 9 aa, Homo sapiens
FAEMSSQLH

SEQ ID NO: 46644 - protein, 15 aa, Homo sapiens
KTLLSLALVGACITL

SEQ ID NO: 46645 - protein, 9 aa, Homo sapiens
LLSLALVGA

SEQ ID NO: 46646 - protein, 15 aa, Homo sapiens
RRDFAEMSSQLHLTP

SEQ ID NO: 46647 - protein, 9 aa, Homo sapiens
FAEMSSQLH

SEQ ID NO: 46648 - protein, 15 aa, Homo sapiens
RDFAEMSSQLHLTPF

SEQ ID NO: 46649 - protein, 9 aa, Homo sapiens
FAEMSSQLH

SEQ ID NO: 46650 - protein, 15 aa, Homo sapiens
DAGDVGAAPPGAAPA

SEQ ID NO: 46651 - protein, 9 aa, Homo sapiens
VGAAPPGAA

SEQ ID NO: 46652 - protein, 15 aa, Homo sapiens
AGDVGAAPPGAAPAP

SEQ ID NO: 46653 - protein, 9 aa, Homo sapiens
VGAAPPGAA

SEQ ID NO: 46654 - protein, 15 aa, Homo sapiens
EWDAGDVGAAPPGAA

SEQ ID NO: 46655 - protein, 9 aa, Homo sapiens
DVGAAPPGA

SEQ ID NO: 46656 - protein, 15 aa, Homo sapiens
WDAGDVGAAPPGAAP

SEQ ID NO: 46657 - protein, 9 aa, Homo sapiens
VGAAPPGAA

SEQ ID NO: 46658 - protein, 15 aa, Homo sapiens
GDVGAAPPGAAPAPG

SEQ ID NO: 46659 - protein, 9 aa, Homo sapiens
VGAAPPGAA

SEQ ID NO: 46660 - protein, 15 aa, Homo sapiens
RPLFDFSWLSLKTLL

SEQ ID NO: 46661 - protein, 9 aa, Homo sapiens
FSWLSLKTL

SEQ ID NO: 46662 - protein, 15 aa, Homo sapiens
ALVGACITLGAYLGH

SEQ ID NO: 46663 - protein, 9 aa, Homo sapiens
LVGACITLG

SEQ ID NO: 46664 - protein, 15 aa, Homo sapiens
MRPLFDFSWLSLKTL

SEQ ID NO: 46665 - protein, 9 aa, Homo sapiens
DFSWLSLKT

SEQ ID NO: 46666 - protein, 15 aa, Homo sapiens
LVGACITLGAYLGHK

SEQ ID NO: 46667 - protein, 9 aa, Homo sapiens
LVGACITLG

SEQ ID NO: 46668 - protein, 15 aa, Homo sapiens
EIVMKYIHYKLSQRG

SEQ ID NO: 46669 - protein, 9 aa, Homo sapiens
MKYIHYKLS

SEQ ID NO: 46670 - protein, 15 aa, Homo sapiens
IVMKYIHYKLSQRGY

SEQ ID NO: 46671 - protein, 9 aa, Homo sapiens
IHYKLSQRG

SEQ ID NO: 46672 - protein, 15 aa, Homo sapiens
VMKYIHYKLSQRGYE

SEQ ID NO: 46673 - protein, 9 aa, Homo sapiens
IHYKLSQRG

SEQ ID NO: 46674 - protein, 15 aa, Homo sapiens
MKYIHYKLSQRGYEW

SEQ ID NO: 46675 - protein, 9 aa, Homo sapiens
IHYKLSQRG

SEQ ID NO: 46676 - protein, 15 aa, Homo sapiens
KYIHYKLSQRGYEWD

SEQ ID NO: 46677 - protein, 9 aa, Homo sapiens
IHYKLSQRG

SEQ ID NO: 46678 - protein, 15 aa, Homo sapiens
REMSPLVDNIALWMT

SEQ ID NO: 46679 - protein, 9 aa, Homo sapiens
LVDNIALWM

SEQ ID NO: 46680 - protein, 15 aa, Homo sapiens
EMSPLVDNIALWMTE

SEQ ID NO: 46681 - protein, 9 aa, Homo sapiens
VDNIALWMT

SEQ ID NO: 46682 - protein, 15 aa, Homo sapiens
SPLVDNIALWMTEYL

SEQ ID NO: 46683 - protein, 9 aa, Homo sapiens
VDNIALWMT

SEQ ID NO: 46684 - protein, 15 aa, Homo sapiens
MSPLVDNIALWMTEY

SEQ ID NO: 46685 - protein, 9 aa, Homo sapiens
VDNIALWMT

SEQ ID NO: 46686 - protein, 15 aa, Homo sapiens
RDPVARTSPLQTPAA

SEQ ID NO: 46687 - protein, 9 aa, Homo sapiens
VARTSPLQT

SEQ ID NO: 46688 - protein, 15 aa, Homo sapiens
DPVARTSPLQTPAAP

SEQ ID NO: 46689 - protein, 9 aa, Homo sapiens
VARTSPLQT

SEQ ID NO: 46690 - protein, 15 aa, Homo sapiens
PLVDNIALWMTEYLN

SEQ ID NO: 46691 - protein, 9 aa, Homo sapiens
VDNIALWMT

SEQ ID NO: 46692 - protein, 15 aa, Homo sapiens
DAFVELYGPSMRPLF

SEQ ID NO: 46693 - protein, 9 aa, Homo sapiens
FVELYGPSM

SEQ ID NO: 46694 - protein, 15 aa, Homo sapiens
DVGAAPPGAAPAPGI

SEQ ID NO: 46695 - protein, 9 aa, Homo sapiens
VGAAPPGAA

SEQ ID NO: 46696 - protein, 15 aa, Homo sapiens
SRDPVARTSPLQTPA

SEQ ID NO: 46697 - protein, 9 aa, Homo sapiens
VARTSPLQT

SEQ ID NO: 46698 - protein, 15 aa, Homo sapiens
WDAFVELYGPSMRPL

SEQ ID NO: 46699 - protein, 9 aa, Homo sapiens
FVELYGPSM

SEQ ID NO: 46700 - protein, 15 aa, Homo sapiens
ASRDPVARTSPLQTP

SEQ ID NO: 46701 - protein, 9 aa, Homo sapiens
VARTSPLQT

SEQ ID NO: 46702 - protein, 15 aa, Homo sapiens
LSPVPPVVHLTLRQA

SEQ ID NO: 46703 - protein, 9 aa, Homo sapiens
LSPVPPVVH

SEQ ID NO: 46704 - protein, 15 aa, Homo sapiens
DFAEMSSQLHLTPFT

SEQ ID NO: 46705 - protein, 9 aa, Homo sapiens
FAEMSSQLH

SEQ ID NO: 46706 - protein, 15 aa, Homo sapiens
VPPVVHLTLRQAGDD

SEQ ID NO: 46707 - protein, 9 aa, Homo sapiens
VVHLTLRQA

SEQ ID NO: 46708 - protein, 15 aa, Homo sapiens
SPVPPVVHLTLRQAG

SEQ ID NO: 46709 - protein, 9 aa, Homo sapiens
VVHLTLRQA

SEQ ID NO: 46710 - protein, 15 aa, Homo sapiens
PVPPVVHLTLRQAGD

SEQ ID NO: 46711 - protein, 9 aa, Homo sapiens
VVHLTLRQA

SEQ ID NO: 46712 - protein, 15 aa, Homo sapiens
FAEMSSQLHLTPFTA

SEQ ID NO: 46713 - protein, 9 aa, Homo sapiens
FAEMSSQLH

SEQ ID NO: 46714 - protein, 15 aa, Homo sapiens
VGAAPPGAAPAPGIF

SEQ ID NO: 46715 - protein, 9 aa, Homo sapiens
VGAAPPGAA

SEQ ID NO: 46716 - protein, 15 aa, Homo sapiens
PPVVHLTLRQAGDDF

SEQ ID NO: 46717 - protein, 9 aa, Homo sapiens
VVHLTLRQA

SEQ ID NO: 46718 - protein, 15 aa, Homo sapiens
AAAGPALSPVPPVVH

SEQ ID NO: 46719 - protein, 9 aa, Homo sapiens
AAAGPALSP

SEQ ID NO: 46720 - protein, 15 aa, Homo sapiens
ESVNREMSPLVDNIA

SEQ ID NO: 46721 - protein, 9 aa, Homo sapiens
VNREMSPLV

SEQ ID NO: 46722 - protein, 15 aa, Homo sapiens
AASRDPVARTSPLQT

SEQ ID NO: 46723 - protein, 9 aa, Homo sapiens
SRDPVARTS

SEQ ID NO: 46724 - protein, 15 aa, Homo sapiens
SQLHLTPFTARGRFA

SEQ ID NO: 46725 - protein, 9 aa, Homo sapiens
LTPFTARGR

SEQ ID NO: 46726 - protein, 15 aa, Homo sapiens
MSSQLHLTPFTARGR

SEQ ID NO: 46727 - protein, 9 aa, Homo sapiens
LHLTPFTAR

SEQ ID NO: 46728 - protein, 15 aa, Homo sapiens
SSQLHLTPFTARGRF

SEQ ID NO: 46729 - protein, 9 aa, Homo sapiens
LTPFTARGR

SEQ ID NO: 46730 - protein, 15 aa, Homo sapiens
AAGPALSPVPPVVHL

SEQ ID NO: 46731 - protein, 9 aa, Homo sapiens
LSPVPPVVH

SEQ ID NO: 46732 - protein, 15 aa, Homo sapiens
QLHLTPFTARGRFAT

SEQ ID NO: 46733 - protein, 9 aa, Homo sapiens
LTPFTARGR

SEQ ID NO: 46734 - protein, 15 aa, Homo sapiens
AFVELYGPSMRPLFD

SEQ ID NO: 46735 - protein, 9 aa, Homo sapiens
LYGPSMRPL

SEQ ID NO: 46736 - protein, 15 aa, Homo sapiens
VMCVESVNREMSPLV

SEQ ID NO: 46737 - protein, 9 aa, Homo sapiens
VMCVESVNR

SEQ ID NO: 46738 - protein, 15 aa, Homo sapiens
CVESVNREMSPLVDN

SEQ ID NO: 46739 - protein, 9 aa, Homo sapiens
VNREMSPLV

SEQ ID NO: 46740 - protein, 15 aa, Homo sapiens
VESVNREMSPLVDNI

SEQ ID NO: 46741 - protein, 9 aa, Homo sapiens
VNREMSPLV

SEQ ID NO: 46742 - protein, 15 aa, Homo sapiens
FVELYGPSMRPLFDF

SEQ ID NO: 46743 - protein, 9 aa, Homo sapiens
LYGPSMRPL

SEQ ID NO: 46744 - protein, 15 aa, Homo sapiens
MCVESVNREMSPLVD

SEQ ID NO: 46745 - protein, 9 aa, Homo sapiens
VNREMSPLV

SEQ ID NO: 46746 - protein, 15 aa, Homo sapiens
LHLTPFTARGRFATV

SEQ ID NO: 46747 - protein, 9 aa, Homo sapiens
LTPFTARGR

SEQ ID NO: 46748 - protein, 15 aa, Homo sapiens
AGPALSPVPPVVHLT

SEQ ID NO: 46749 - protein, 9 aa, Homo sapiens
LSPVPPVVH

SEQ ID NO: 46750 - protein, 15 aa, Homo sapiens
GPALSPVPPVVHLTL

SEQ ID NO: 46751 - protein, 9 aa, Homo sapiens
LSPVPPVVH

SEQ ID NO: 46752 - protein, 15 aa, Homo sapiens
VAFFEFGGVMCVESV

SEQ ID NO: 46753 - protein, 9 aa, Homo sapiens
FEFGGVMCV

SEQ ID NO: 46754 - protein, 15 aa, Homo sapiens
AFFEFGGVMCVESVN

SEQ ID NO: 46755 - protein, 9 aa, Homo sapiens
FEFGGVMCV

SEQ ID NO: 46756 - protein, 15 aa, Homo sapiens
PGIFSSQPGHTPHPA

SEQ ID NO: 46757 - protein, 9 aa, Homo sapiens
FSSQPGHTP

SEQ ID NO: 46758 - protein, 15 aa, Homo sapiens
VDNIALWMTEYLNRH

SEQ ID NO: 46759 - protein, 9 aa, Homo sapiens
VDNIALWMT

SEQ ID NO: 46760 - protein, 15 aa, Homo sapiens
APAPGIFSSQPGHTP

SEQ ID NO: 46761 - protein, 9 aa, Homo sapiens
IFSSQPGHT

SEQ ID NO: 46762 - protein, 15 aa, Homo sapiens
PALSPVPPVVHLTLR

SEQ ID NO: 46763 - protein, 9 aa, Homo sapiens
LSPVPPVVH

SEQ ID NO: 46764 - protein, 15 aa, Homo sapiens
IVAFFEFGGVMCVES

SEQ ID NO: 46765 - protein, 9 aa, Homo sapiens
FEFGGVMCV

SEQ ID NO: 46766 - protein, 15 aa, Homo sapiens
PVARTSPLQTPAAPG

SEQ ID NO: 46767 - protein, 9 aa, Homo sapiens
VARTSPLQT

SEQ ID NO: 46768 - protein, 15 aa, Homo sapiens
APGIFSSQPGHTPHP

SEQ ID NO: 46769 - protein, 9 aa, Homo sapiens
FSSQPGHTP

SEQ ID NO: 46770 - protein, 15 aa, Homo sapiens
HLTPFTARGRFATVV

SEQ ID NO: 46771 - protein, 9 aa, Homo sapiens
LTPFTARGR

SEQ ID NO: 46772 - protein, 15 aa, Homo sapiens
LTPFTARGRFATVVE

SEQ ID NO: 46773 - protein, 9 aa, Homo sapiens
ARGRFATVV

SEQ ID NO: 46774 - protein, 15 aa, Homo sapiens
ELFRDGVNWGRIVAF

SEQ ID NO: 46775 - protein, 9 aa, Homo sapiens
FRDGVNWGR

SEQ ID NO: 46776 - protein, 15 aa, Homo sapiens
PAPGIFSSQPGHTPH

SEQ ID NO: 46777 - protein, 9 aa, Homo sapiens
FSSQPGHTP

SEQ ID NO: 46778 - protein, 15 aa, Homo sapiens
FRDGVNWGRIVAFFE

SEQ ID NO: 46779 - protein, 9 aa, Homo sapiens
VNWGRIVAF

SEQ ID NO: 46780 - protein, 15 aa, Homo sapiens
LVDNIALWMTEYLNR

SEQ ID NO: 46781 - protein, 9 aa, Homo sapiens
VDNIALWMT

SEQ ID NO: 46782 - protein, 15 aa, Homo sapiens
YIHYKLSQRGYEWDA

SEQ ID NO: 46783 - protein, 9 aa, Homo sapiens
IHYKLSQRG

SEQ ID NO: 46784 - protein, 15 aa, Homo sapiens
LFRDGVNWGRIVAFF

SEQ ID NO: 46785 - protein, 9 aa, Homo sapiens
VNWGRIVAF

SEQ ID NO: 46786 - protein, 15 aa, Homo sapiens
IHYKLSQRGYEWDAG

SEQ ID NO: 46787 - protein, 9 aa, Homo sapiens
IHYKLSQRG

SEQ ID NO: 46788 - protein, 15 aa, Homo sapiens
GIFSSQPGHTPHPAA

SEQ ID NO: 46789 - protein, 9 aa, Homo sapiens
FSSQPGHTP

SEQ ID NO: 46790 - protein, 15 aa, Homo sapiens
AAPGAAAGPALSPVP

SEQ ID NO: 46791 - protein, 9 aa, Homo sapiens
AAAGPALSP

SEQ ID NO: 46792 - protein, 15 aa, Homo sapiens
RDGVNWGRIVAFFEF

SEQ ID NO: 46793 - protein, 9 aa, Homo sapiens
VNWGRIVAF

SEQ ID NO: 46794 - protein, 15 aa, Homo sapiens
TPAAPGAAAGPALSP

SEQ ID NO: 46795 - protein, 9 aa, Homo sapiens
GAAAGPALS

SEQ ID NO: 46796 - protein, 15 aa, Homo sapiens
GWDAFVELYGPSMRP

SEQ ID NO: 46797 - protein, 9 aa, Homo sapiens
FVELYGPSM

SEQ ID NO: 46798 - protein, 15 aa, Homo sapiens
PAAPGAAAGPALSPV

SEQ ID NO: 46799 - protein, 9 aa, Homo sapiens
AAAGPALSP

SEQ ID NO: 46800 - protein, 15 aa, Homo sapiens
APGAAAGPALSPVPP

SEQ ID NO: 46801 - protein, 9 aa, Homo sapiens
AAAGPALSP

SEQ ID NO: 46802 - protein, 15 aa, Homo sapiens
DGVNWGRIVAFFEFG

SEQ ID NO: 46803 - protein, 9 aa, Homo sapiens
VNWGRIVAF

SEQ ID NO: 46804 - protein, 15 aa, Homo sapiens
SRRYRRDFAEMSSQL

SEQ ID NO: 46805 - protein, 9 aa, Homo sapiens
YRRDFAEMS

SEQ ID NO: 46806 - protein, 15 aa, Homo sapiens
PVVHLTLRQAGDDFS

SEQ ID NO: 46807 - protein, 9 aa, Homo sapiens
VVHLTLRQA

SEQ ID NO: 46808 - protein, 15 aa, Homo sapiens
VELYGPSMRPLFDFS

SEQ ID NO: 46809 - protein, 9 aa, Homo sapiens
LYGPSMRPL

SEQ ID NO: 46810 - protein, 15 aa, Homo sapiens
VVHLTLRQAGDDFSR

SEQ ID NO: 46811 - protein, 9 aa, Homo sapiens
VVHLTLRQA

SEQ ID NO: 46812 - protein, 15 aa, Homo sapiens
FSRRYRRDFAEMSSQ

SEQ ID NO: 46813 - protein, 9 aa, Homo sapiens
YRRDFAEMS

SEQ ID NO: 46814 - protein, 15 aa, Homo sapiens
DFSRRYRRDFAEMSS

SEQ ID NO: 46815 - protein, 9 aa, Homo sapiens
YRRDFAEMS

SEQ ID NO: 46816 - protein, 15 aa, Homo sapiens
DDFSRRYRRDFAEMS

SEQ ID NO: 46817 - protein, 9 aa, Homo sapiens
RYRRDFAEM

SEQ ID NO: 46818 - protein, 15 aa, Homo sapiens
GRIVAFFEFGGVMCV

SEQ ID NO: 46819 - protein, 9 aa, Homo sapiens
FFEFGGVMC

SEQ ID NO: 46820 - protein, 15 aa, Homo sapiens
RIVAFFEFGGVMCVE

SEQ ID NO: 46821 - protein, 9 aa, Homo sapiens
FEFGGVMCV

SEQ ID NO: 46822 - protein, 15 aa, Homo sapiens
PGAAAGPALSPVPPV

SEQ ID NO: 46823 - protein, 9 aa, Homo sapiens
AAAGPALSP

SEQ ID NO: 46824 - protein, 15 aa, Homo sapiens
SVNREMSPLVDNIAL

SEQ ID NO: 46825 - protein, 9 aa, Homo sapiens
VNREMSPLV

SEQ ID NO: 46826 - protein, 15 aa, Homo sapiens
FFEFGGVMCVESVNR

SEQ ID NO: 46827 - protein, 9 aa, Homo sapiens
FEFGGVMCV

SEQ ID NO: 46828 - protein, 15 aa, Homo sapiens
VNREMSPLVDNIALW

SEQ ID NO: 46829 - protein, 9 aa, Homo sapiens
VNREMSPLV

SEQ ID NO: 46830 - protein, 15 aa, Homo sapiens
FEFGGVMCVESVNRE

SEQ ID NO: 46831 - protein, 9 aa, Homo sapiens
FEFGGVMCV

SEQ ID NO: 46832 - protein, 15 aa, Homo sapiens
EMSSQLHLTPFTARG

SEQ ID NO: 46833 - protein, 9 aa, Homo sapiens
LHLTPFTAR

SEQ ID NO: 46834 - protein, 15 aa, Homo sapiens
TPFTARGRFATVVEE

SEQ ID NO: 46835 - protein, 9 aa, Homo sapiens
ARGRFATVV

SEQ ID NO: 46836 - protein, 15 aa, Homo sapiens
QTPAAPGAAAGPALS

SEQ ID NO: 46837 - protein, 9 aa, Homo sapiens
APGAAAGPA

SEQ ID NO: 46838 - protein, 15 aa, Homo sapiens
FSSQPGHTPHPAASR

SEQ ID NO: 46839 - protein, 9 aa, Homo sapiens
FSSQPGHTP

SEQ ID NO: 46840 - protein, 15 aa, Homo sapiens
IFSSQPGHTPHPAAS

SEQ ID NO: 46841 - protein, 9 aa, Homo sapiens
FSSQPGHTP

SEQ ID NO: 46842 - protein, 15 aa, Homo sapiens
GAAPPGAAPAPGIFS

SEQ ID NO: 46843 - protein, 9 aa, Homo sapiens
PGAAPAPGI

SEQ ID NO: 46844 - protein, 15 aa, Homo sapiens
PFTARGRFATVVEEL

SEQ ID NO: 46845 - protein, 9 aa, Homo sapiens
ARGRFATVV

SEQ ID NO: 46846 - protein, 15 aa, Homo sapiens
FTARGRFATVVEELF

SEQ ID NO: 46847 - protein, 9 aa, Homo sapiens
ARGRFATVV

SEQ ID NO: 46848 - protein, 15 aa, Homo sapiens
ALWMTEYLNRHLHTW

SEQ ID NO: 46849 - protein, 9 aa, Homo sapiens
WMTEYLNRH

SEQ ID NO: 46850 - protein, 15 aa, Homo sapiens
ALSPVPPVVHLTLRQ

SEQ ID NO: 46851 - protein, 9 aa, Homo sapiens
LSPVPPVVH

SEQ ID NO: 46852 - protein, 15 aa, Homo sapiens
AEMSSQLHLTPFTAR

SEQ ID NO: 46853 - protein, 9 aa, Homo sapiens
SQLHLTPFT

SEQ ID NO: 46854 - protein, 15 aa, Homo sapiens
DNIALWMTEYLNRHL

SEQ ID NO: 46855 - protein, 9 aa, Homo sapiens
WMTEYLNRH

SEQ ID NO: 46856 - protein, 15 aa, Homo sapiens
GGWDAFVELYGPSMR

SEQ ID NO: 46857 - protein, 9 aa, Homo sapiens
FVELYGPSM

SEQ ID NO: 46858 - protein, 15 aa, Homo sapiens
ELYGPSMRPLFDFSW

SEQ ID NO: 46859 - protein, 9 aa, Homo sapiens
LYGPSMRPL

SEQ ID NO: 46860 - protein, 15 aa, Homo sapiens
AAPPGAAPAPGIFSS

SEQ ID NO: 46861 - protein, 9 aa, Homo sapiens
AAPAPGIFS

SEQ ID NO: 46862 - protein, 15 aa, Homo sapiens
GAAAGPALSPVPPVV

SEQ ID NO: 46863 - protein, 9 aa, Homo sapiens
AAAGPALSP

SEQ ID NO: 46864 - protein, 15 aa, Homo sapiens
NIALWMTEYLNRHLH

SEQ ID NO: 46865 - protein, 9 aa, Homo sapiens
WMTEYLNRH

SEQ ID NO: 46866 - protein, 15 aa, Homo sapiens
YEWDAGDVGAAPPGA

SEQ ID NO: 46867 - protein, 9 aa, Homo sapiens
WDAGDVGAA

SEQ ID NO: 46868 - protein, 15 aa, Homo sapiens
AAPAPGIFSSQPGHT

SEQ ID NO: 46869 - protein, 9 aa, Homo sapiens
AAPAPGIFS

SEQ ID NO: 46870 - protein, 15 aa, Homo sapiens
NREMSPLVDNIALWM

SEQ ID NO: 46871 - protein, 9 aa, Homo sapiens
MSPLVDNIA

SEQ ID NO: 46872 - protein, 15 aa, Homo sapiens
PLFDFSWLSLKTLLS

SEQ ID NO: 46873 - protein, 9 aa, Homo sapiens
DFSWLSLKT

SEQ ID NO: 46874 - protein, 15 aa, Homo sapiens
DFSWLSLKTLLSLAL

SEQ ID NO: 46875 - protein, 9 aa, Homo sapiens
WLSLKTLLS

SEQ ID NO: 46876 - protein, 15 aa, Homo sapiens
FSWLSLKTLLSLALV

SEQ ID NO: 46877 - protein, 9 aa, Homo sapiens
WLSLKTLLS

SEQ ID NO: 46878 - protein, 15 aa, Homo sapiens
LFDFSWLSLKTLLSL

SEQ ID NO: 46879 - protein, 9 aa, Homo sapiens
WLSLKTLLS

SEQ ID NO: 46880 - protein, 15 aa, Homo sapiens
FDFSWLSLKTLLSLA

SEQ ID NO: 46881 - protein, 9 aa, Homo sapiens
WLSLKTLLS

SEQ ID NO: 46882 - protein, 15 aa, Homo sapiens
VMCVESVNREMSPLV

SEQ ID NO: 46883 - protein, 9 aa, Homo sapiens
MCVESVNRE

SEQ ID NO: 46884 - protein, 15 aa, Homo sapiens
CVESVNREMSPLVDN

SEQ ID NO: 46885 - protein, 9 aa, Homo sapiens
VNREMSPLV

SEQ ID NO: 46886 - protein, 15 aa, Homo sapiens
MCVESVNREMSPLVD

SEQ ID NO: 46887 - protein, 9 aa, Homo sapiens
VNREMSPLV

SEQ ID NO: 46888 - protein, 15 aa, Homo sapiens
ESVNREMSPLVDNIA

SEQ ID NO: 46889 - protein, 9 aa, Homo sapiens
VNREMSPLV

SEQ ID NO: 46890 - protein, 15 aa, Homo sapiens
VESVNREMSPLVDNI

SEQ ID NO: 46891 - protein, 9 aa, Homo sapiens
VNREMSPLV

SEQ ID NO: 46892 - protein, 15 aa, Homo sapiens
WLSLKTLLSLALVGA

SEQ ID NO: 46893 - protein, 9 aa, Homo sapiens
WLSLKTLLS

SEQ ID NO: 46894 - protein, 15 aa, Homo sapiens
SWLSLKTLLSLALVG

SEQ ID NO: 46895 - protein, 9 aa, Homo sapiens
WLSLKTLLS

SEQ ID NO: 46896 - protein, 15 aa, Homo sapiens
RRYRRDFAEMSSQLH

SEQ ID NO: 46897 - protein, 9 aa, Homo sapiens
YRRDFAEMS

SEQ ID NO: 46898 - protein, 15 aa, Homo sapiens
VDNIALWMTEYLNRH

SEQ ID NO: 46899 - protein, 9 aa, Homo sapiens
NIALWMTEY

SEQ ID NO: 46900 - protein, 15 aa, Homo sapiens
ALWMTEYLNRHLHTW

SEQ ID NO: 46901 - protein, 9 aa, Homo sapiens
WMTEYLNRH

SEQ ID NO: 46902 - protein, 15 aa, Homo sapiens
VDNIALWMTEYLNRH

SEQ ID NO: 46903 - protein, 9 aa, Homo sapiens
IALWMTEYL

SEQ ID NO: 46904 - protein, 15 aa, Homo sapiens
DNIALWMTEYLNRHL

SEQ ID NO: 46905 - protein, 9 aa, Homo sapiens
WMTEYLNRH

SEQ ID NO: 46906 - protein, 15 aa, Homo sapiens
NIALWMTEYLNRHLH

SEQ ID NO: 46907 - protein, 9 aa, Homo sapiens
WMTEYLNRH

SEQ ID NO: 46908 - protein, 15 aa, Homo sapiens
IALWMTEYLNRHLHT

SEQ ID NO: 46909 - protein, 9 aa, Homo sapiens
WMTEYLNRH

SEQ ID NO: 46910 - protein, 15 aa, Homo sapiens
LWMTEYLNRHLHTWI

SEQ ID NO: 46911 - protein, 9 aa, Homo sapiens
WMTEYLNRH

SEQ ID NO: 46912 - protein, 15 aa, Homo sapiens
MSSQLHLTPFTARGR

SEQ ID NO: 46913 - protein, 9 aa, Homo sapiens
HLTPFTARG

SEQ ID NO: 46914 - protein, 15 aa, Homo sapiens
EMSSQLHLTPFTARG

SEQ ID NO: 46915 - protein, 9 aa, Homo sapiens
LHLTPFTAR

SEQ ID NO: 46916 - protein, 15 aa, Homo sapiens
WMTEYLNRHLHTWIQ

SEQ ID NO: 46917 - protein, 9 aa, Homo sapiens
WMTEYLNRH

SEQ ID NO: 46918 - protein, 15 aa, Homo sapiens
SSQLHLTPFTARGRF

SEQ ID NO: 46919 - protein, 9 aa, Homo sapiens
HLTPFTARG

SEQ ID NO: 46920 - protein, 15 aa, Homo sapiens
SQLHLTPFTARGRFA

SEQ ID NO: 46921 - protein, 9 aa, Homo sapiens
HLTPFTARG

SEQ ID NO: 46922 - protein, 15 aa, Homo sapiens
QLHLTPFTARGRFAT

SEQ ID NO: 46923 - protein, 9 aa, Homo sapiens
HLTPFTARG

SEQ ID NO: 46924 - protein, 15 aa, Homo sapiens
APGIFSSQPGHTPHP

SEQ ID NO: 46925 - protein, 9 aa, Homo sapiens
FSSQPGHTP

SEQ ID NO: 46926 - protein, 15 aa, Homo sapiens
PGIFSSQPGHTPHPA

SEQ ID NO: 46927 - protein, 9 aa, Homo sapiens
FSSQPGHTP

SEQ ID NO: 46928 - protein, 15 aa, Homo sapiens
GIFSSQPGHTPHPAA

SEQ ID NO: 46929 - protein, 9 aa, Homo sapiens
SQPGHTPHP

SEQ ID NO: 46930 - protein, 15 aa, Homo sapiens
RRDFAEMSSQLHLTP

SEQ ID NO: 46931 - protein, 9 aa, Homo sapiens
FAEMSSQLH

SEQ ID NO: 46932 - protein, 15 aa, Homo sapiens
FDFSWLSLKTLLSLA

SEQ ID NO: 46933 - protein, 9 aa, Homo sapiens
WLSLKTLLS

SEQ ID NO: 46934 - protein, 15 aa, Homo sapiens
RDFAEMSSQLHLTPF

SEQ ID NO: 46935 - protein, 9 aa, Homo sapiens
FAEMSSQLH

SEQ ID NO: 46936 - protein, 15 aa, Homo sapiens
DFSWLSLKTLLSLAL

SEQ ID NO: 46937 - protein, 9 aa, Homo sapiens
WLSLKTLLS

SEQ ID NO: 46938 - protein, 15 aa, Homo sapiens
FSWLSLKTLLSLALV

SEQ ID NO: 46939 - protein, 9 aa, Homo sapiens
WLSLKTLLS

SEQ ID NO: 46940 - protein, 15 aa, Homo sapiens
PLFDFSWLSLKTLLS

SEQ ID NO: 46941 - protein, 9 aa, Homo sapiens
FSWLSLKTL

SEQ ID NO: 46942 - protein, 15 aa, Homo sapiens
LFDFSWLSLKTLLSL

SEQ ID NO: 46943 - protein, 9 aa, Homo sapiens
WLSLKTLLS

SEQ ID NO: 46944 - protein, 15 aa, Homo sapiens
FDFSWLSLKTLLSLA

SEQ ID NO: 46945 - protein, 9 aa, Homo sapiens
WLSLKTLLS

SEQ ID NO: 46946 - protein, 15 aa, Homo sapiens
DFSWLSLKTLLSLAL

SEQ ID NO: 46947 - protein, 9 aa, Homo sapiens
WLSLKTLLS

SEQ ID NO: 46948 - protein, 15 aa, Homo sapiens
FSWLSLKTLLSLALV

SEQ ID NO: 46949 - protein, 9 aa, Homo sapiens
WLSLKTLLS

SEQ ID NO: 46950 - protein, 15 aa, Homo sapiens
SWLSLKTLLSLALVG

SEQ ID NO: 46951 - protein, 9 aa, Homo sapiens
WLSLKTLLS

SEQ ID NO: 46952 - protein, 15 aa, Homo sapiens
WLSLKTLLSLALVGA

SEQ ID NO: 46953 - protein, 9 aa, Homo sapiens
WLSLKTLLS

SEQ ID NO: 46954 - protein, 15 aa, Homo sapiens
ESVNREMSPLVDNIA

SEQ ID NO: 46955 - protein, 9 aa, Homo sapiens
NREMSPLVD

SEQ ID NO: 46956 - protein, 15 aa, Homo sapiens
CVESVNREMSPLVDN

SEQ ID NO: 46957 - protein, 9 aa, Homo sapiens
NREMSPLVD

SEQ ID NO: 46958 - protein, 15 aa, Homo sapiens
VESVNREMSPLVDNI

SEQ ID NO: 46959 - protein, 9 aa, Homo sapiens
NREMSPLVD

SEQ ID NO: 46960 - protein, 15 aa, Homo sapiens
VDNIALWMTEYLNRH

SEQ ID NO: 46961 - protein, 9 aa, Homo sapiens
IALWMTEYL

SEQ ID NO: 46962 - protein, 15 aa, Homo sapiens
PLVDNIALWMTEYLN

SEQ ID NO: 46963 - protein, 9 aa, Homo sapiens
IALWMTEYL

SEQ ID NO: 46964 - protein, 15 aa, Homo sapiens
DNIALWMTEYLNRHL

SEQ ID NO: 46965 - protein, 9 aa, Homo sapiens
IALWMTEYL

SEQ ID NO: 46966 - protein, 15 aa, Homo sapiens
LVDNIALWMTEYLNR

SEQ ID NO: 46967 - protein, 9 aa, Homo sapiens
IALWMTEYL

SEQ ID NO: 46968 - protein, 15 aa, Homo sapiens
MCVESVNREMSPLVD

SEQ ID NO: 46969 - protein, 9 aa, Homo sapiens
VNREMSPLV

SEQ ID NO: 46970 - protein, 15 aa, Homo sapiens
SPLVDNIALWMTEYL

SEQ ID NO: 46971 - protein, 9 aa, Homo sapiens
NIALWMTEY

SEQ ID NO: 46972 - protein, 15 aa, Homo sapiens
SVNREMSPLVDNIAL

SEQ ID NO: 46973 - protein, 9 aa, Homo sapiens
NREMSPLVD

SEQ ID NO: 46974 - protein, 15 aa, Homo sapiens
RRYRRDFAEMSSQLH

SEQ ID NO: 46975 - protein, 9 aa, Homo sapiens
YRRDFAEMS

SEQ ID NO: 46976 - protein, 15 aa, Homo sapiens
VNREMSPLVDNIALW

SEQ ID NO: 46977 - protein, 9 aa, Homo sapiens
NREMSPLVD

SEQ ID NO: 46978 - protein, 15 aa, Homo sapiens
GPALSPVPPVVHLTL

SEQ ID NO: 46979 - protein, 9 aa, Homo sapiens
LSPVPPVVH

SEQ ID NO: 46980 - protein, 15 aa, Homo sapiens
AGPALSPVPPVVHLT

SEQ ID NO: 46981 - protein, 9 aa, Homo sapiens
LSPVPPVVH

SEQ ID NO: 46982 - protein, 15 aa, Homo sapiens
AAGPALSPVPPVVHL

SEQ ID NO: 46983 - protein, 9 aa, Homo sapiens
LSPVPPVVH

SEQ ID NO: 46984 - protein, 15 aa, Homo sapiens
PALSPVPPVVHLTLR

SEQ ID NO: 46985 - protein, 9 aa, Homo sapiens
LSPVPPVVH

SEQ ID NO: 46986 - protein, 15 aa, Homo sapiens
AAAGPALSPVPPVVH

SEQ ID NO: 46987 - protein, 9 aa, Homo sapiens
ALSPVPPVV

SEQ ID NO: 46988 - protein, 15 aa, Homo sapiens
ALSPVPPVVHLTLRQ

SEQ ID NO: 46989 - protein, 9 aa, Homo sapiens
LSPVPPVVH

SEQ ID NO: 46990 - protein, 15 aa, Homo sapiens
LSPVPPVVHLTLRQA

SEQ ID NO: 46991 - protein, 9 aa, Homo sapiens
LSPVPPVVH

SEQ ID NO: 46992 - protein, 15 aa, Homo sapiens
DAFVELYGPSMRPLF

SEQ ID NO: 46993 - protein, 9 aa, Homo sapiens
VELYGPSMR

SEQ ID NO: 46994 - protein, 15 aa, Homo sapiens
AFVELYGPSMRPLFD

SEQ ID NO: 46995 - protein, 9 aa, Homo sapiens
YGPSMRPLF

SEQ ID NO: 46996 - protein, 15 aa, Homo sapiens
FVELYGPSMRPLFDF

SEQ ID NO: 46997 - protein, 9 aa, Homo sapiens
YGPSMRPLF

SEQ ID NO: 46998 - protein, 15 aa, Homo sapiens
VELYGPSMRPLFDFS

SEQ ID NO: 46999 - protein, 9 aa, Homo sapiens
YGPSMRPLF

SEQ ID NO: 47000 - protein, 15 aa, Homo sapiens
FSWLSLKTLLSLALV

SEQ ID NO: 47001 - protein, 9 aa, Homo sapiens
WLSLKTLLS

SEQ ID NO: 47002 - protein, 15 aa, Homo sapiens
DFSWLSLKTLLSLAL

SEQ ID NO: 47003 - protein, 9 aa, Homo sapiens
WLSLKTLLS

SEQ ID NO: 47004 - protein, 15 aa, Homo sapiens
LFDFSWLSLKTLLSL

SEQ ID NO: 47005 - protein, 9 aa, Homo sapiens
WLSLKTLLS

SEQ ID NO: 47006 - protein, 15 aa, Homo sapiens
FDFSWLSLKTLLSLA

SEQ ID NO: 47007 - protein, 9 aa, Homo sapiens
WLSLKTLLS

SEQ ID NO: 47008 - protein, 15 aa, Homo sapiens
PLFDFSWLSLKTLLS

SEQ ID NO: 47009 - protein, 9 aa, Homo sapiens
FSWLSLKTL

SEQ ID NO: 47010 - protein, 15 aa, Homo sapiens
SWLSLKTLLSLALVG

SEQ ID NO: 47011 - protein, 9 aa, Homo sapiens
WLSLKTLLS

SEQ ID NO: 47012 - protein, 15 aa, Homo sapiens
WLSLKTLLSLALVGA

SEQ ID NO: 47013 - protein, 9 aa, Homo sapiens
WLSLKTLLS

SEQ ID NO: 47014 - protein, 15 aa, Homo sapiens
DAFVELYGPSMRPLF

SEQ ID NO: 47015 - protein, 9 aa, Homo sapiens
VELYGPSMR

SEQ ID NO: 47016 - protein, 15 aa, Homo sapiens
AFVELYGPSMRPLFD

SEQ ID NO: 47017 - protein, 9 aa, Homo sapiens
VELYGPSMR

SEQ ID NO: 47018 - protein, 15 aa, Homo sapiens
SPLVDNIALWMTEYL

SEQ ID NO: 47019 - protein, 9 aa, Homo sapiens
VDNIALWMT

SEQ ID NO: 47020 - protein, 15 aa, Homo sapiens
PLVDNIALWMTEYLN

SEQ ID NO: 47021 - protein, 9 aa, Homo sapiens
VDNIALWMT

SEQ ID NO: 47022 - protein, 15 aa, Homo sapiens
EIVMKYIHYKLSQRG

SEQ ID NO: 47023 - protein, 9 aa, Homo sapiens
YIHYKLSQR

SEQ ID NO: 47024 - protein, 15 aa, Homo sapiens
IVMKYIHYKLSQRGY

SEQ ID NO: 47025 - protein, 9 aa, Homo sapiens
YIHYKLSQR

SEQ ID NO: 47026 - protein, 15 aa, Homo sapiens
VMKYIHYKLSQRGYE

SEQ ID NO: 47027 - protein, 9 aa, Homo sapiens
YIHYKLSQR

SEQ ID NO: 47028 - protein, 15 aa, Homo sapiens
MKYIHYKLSQRGYEW

SEQ ID NO: 47029 - protein, 9 aa, Homo sapiens
YIHYKLSQR

SEQ ID NO: 47030 - protein, 15 aa, Homo sapiens
REIVMKYIHYKLSQR

SEQ ID NO: 47031 - protein, 9 aa, Homo sapiens
IVMKYIHYK

SEQ ID NO: 47032 - protein, 15 aa, Homo sapiens
KYIHYKLSQRGYEWD

SEQ ID NO: 47033 - protein, 9 aa, Homo sapiens
YIHYKLSQR

SEQ ID NO: 47034 - protein, 15 aa, Homo sapiens
MSSQLHLTPFTARGR

SEQ ID NO: 47035 - protein, 9 aa, Homo sapiens
LHLTPFTAR

SEQ ID NO: 47036 - protein, 15 aa, Homo sapiens
SSQLHLTPFTARGRF

SEQ ID NO: 47037 - protein, 9 aa, Homo sapiens
LHLTPFTAR

SEQ ID NO: 47038 - protein, 15 aa, Homo sapiens
YIHYKLSQRGYEWDA

SEQ ID NO: 47039 - protein, 9 aa, Homo sapiens
YIHYKLSQR

SEQ ID NO: 47040 - protein, 15 aa, Homo sapiens
SQLHLTPFTARGRFA

SEQ ID NO: 47041 - protein, 9 aa, Homo sapiens
LHLTPFTAR

SEQ ID NO: 47042 - protein, 15 aa, Homo sapiens
LHLTPFTARGRFATV

SEQ ID NO: 47043 - protein, 9 aa, Homo sapiens
LTPFTARGR

SEQ ID NO: 47044 - protein, 15 aa, Homo sapiens
EELFRDGVNWGRIVA

SEQ ID NO: 47045 - protein, 9 aa, Homo sapiens
LFRDGVNWG

SEQ ID NO: 47046 - protein, 15 aa, Homo sapiens
FSWLSLKTLLSLALV

SEQ ID NO: 47047 - protein, 9 aa, Homo sapiens
WLSLKTLLS

SEQ ID NO: 47048 - protein, 15 aa, Homo sapiens
DFSWLSLKTLLSLAL

SEQ ID NO: 47049 - protein, 9 aa, Homo sapiens
WLSLKTLLS

SEQ ID NO: 47050 - protein, 15 aa, Homo sapiens
QLHLTPFTARGRFAT

SEQ ID NO: 47051 - protein, 9 aa, Homo sapiens
LHLTPFTAR

SEQ ID NO: 47052 - protein, 15 aa, Homo sapiens
SPVPPVVHLTLRQAG

SEQ ID NO: 47053 - protein, 9 aa, Homo sapiens
VVHLTLRQA

SEQ ID NO: 47054 - protein, 15 aa, Homo sapiens
PVPPVVHLTLRQAGD

SEQ ID NO: 47055 - protein, 9 aa, Homo sapiens
VVHLTLRQA

SEQ ID NO: 47056 - protein, 15 aa, Homo sapiens
WLSLKTLLSLALVGA

SEQ ID NO: 47057 - protein, 9 aa, Homo sapiens
LKTLLSLAL

SEQ ID NO: 47058 - protein, 15 aa, Homo sapiens
LFDFSWLSLKTLLSL

SEQ ID NO: 47059 - protein, 9 aa, Homo sapiens
WLSLKTLLS

SEQ ID NO: 47060 - protein, 15 aa, Homo sapiens
VMCVESVNREMSPLV

SEQ ID NO: 47061 - protein, 9 aa, Homo sapiens
VMCVESVNR

SEQ ID NO: 47062 - protein, 15 aa, Homo sapiens
GGWDAFVELYGPSMR

SEQ ID NO: 47063 - protein, 9 aa, Homo sapiens
FVELYGPSM

SEQ ID NO: 47064 - protein, 15 aa, Homo sapiens
WDAFVELYGPSMRPL

SEQ ID NO: 47065 - protein, 9 aa, Homo sapiens
VELYGPSMR

SEQ ID NO: 47066 - protein, 15 aa, Homo sapiens
DAFVELYGPSMRPLF

SEQ ID NO: 47067 - protein, 9 aa, Homo sapiens
FVELYGPSM

SEQ ID NO: 47068 - protein, 15 aa, Homo sapiens
TVVEELFRDGVNWGR

SEQ ID NO: 47069 - protein, 9 aa, Homo sapiens
LFRDGVNWG

SEQ ID NO: 47070 - protein, 15 aa, Homo sapiens
VVEELFRDGVNWGRI

SEQ ID NO: 47071 - protein, 9 aa, Homo sapiens
LFRDGVNWG

SEQ ID NO: 47072 - protein, 15 aa, Homo sapiens
GWDAFVELYGPSMRP

SEQ ID NO: 47073 - protein, 9 aa, Homo sapiens
VELYGPSMR

SEQ ID NO: 47074 - protein, 15 aa, Homo sapiens
ALWMTEYLNRHLHTW

SEQ ID NO: 47075 - protein, 9 aa, Homo sapiens
WMTEYLNRH

SEQ ID NO: 47076 - protein, 15 aa, Homo sapiens
PLFDFSWLSLKTLLS

SEQ ID NO: 47077 - protein, 9 aa, Homo sapiens
LFDFSWLSL

SEQ ID NO: 47078 - protein, 15 aa, Homo sapiens
NIALWMTEYLNRHLH

SEQ ID NO: 47079 - protein, 9 aa, Homo sapiens
WMTEYLNRH

SEQ ID NO: 47080 - protein, 15 aa, Homo sapiens
IALWMTEYLNRHLHT

SEQ ID NO: 47081 - protein, 9 aa, Homo sapiens
WMTEYLNRH

SEQ ID NO: 47082 - protein, 15 aa, Homo sapiens
VEELFRDGVNWGRIV

SEQ ID NO: 47083 - protein, 9 aa, Homo sapiens
LFRDGVNWG

SEQ ID NO: 47084 - protein, 15 aa, Homo sapiens
DNIALWMTEYLNRHL

SEQ ID NO: 47085 - protein, 9 aa, Homo sapiens
WMTEYLNRH

SEQ ID NO: 47086 - protein, 15 aa, Homo sapiens
VPPVVHLTLRQAGDD

SEQ ID NO: 47087 - protein, 9 aa, Homo sapiens
VVHLTLRQA

SEQ ID NO: 47088 - protein, 15 aa, Homo sapiens
FDFSWLSLKTLLSLA

SEQ ID NO: 47089 - protein, 9 aa, Homo sapiens
WLSLKTLLS

SEQ ID NO: 47090 - protein, 15 aa, Homo sapiens
ELFRDGVNWGRIVAF

SEQ ID NO: 47091 - protein, 9 aa, Homo sapiens
LFRDGVNWG

SEQ ID NO: 47092 - protein, 15 aa, Homo sapiens
LSPVPPVVHLTLRQA

SEQ ID NO: 47093 - protein, 9 aa, Homo sapiens
PPVVHLTLR

SEQ ID NO: 47094 - protein, 15 aa, Homo sapiens
SWLSLKTLLSLALVG

SEQ ID NO: 47095 - protein, 9 aa, Homo sapiens
LKTLLSLAL

SEQ ID NO: 47096 - protein, 15 aa, Homo sapiens
PPVVHLTLRQAGDDF

SEQ ID NO: 47097 - protein, 9 aa, Homo sapiens
VVHLTLRQA

SEQ ID NO: 47098 - protein, 15 aa, Homo sapiens
DAFVELYGPSMRPLF

SEQ ID NO: 47099 - protein, 9 aa, Homo sapiens
VELYGPSMR

SEQ ID NO: 47100 - protein, 15 aa, Homo sapiens
AFVELYGPSMRPLFD

SEQ ID NO: 47101 - protein, 9 aa, Homo sapiens
VELYGPSMR

SEQ ID NO: 47102 - protein, 15 aa, Homo sapiens
WDAFVELYGPSMRPL

SEQ ID NO: 47103 - protein, 9 aa, Homo sapiens
VELYGPSMR

SEQ ID NO: 47104 - protein, 15 aa, Homo sapiens
GGWDAFVELYGPSMR

SEQ ID NO: 47105 - protein, 9 aa, Homo sapiens
FVELYGPSM

SEQ ID NO: 47106 - protein, 15 aa, Homo sapiens
GWDAFVELYGPSMRP

SEQ ID NO: 47107 - protein, 9 aa, Homo sapiens
VELYGPSMR

SEQ ID NO: 47108 - protein, 15 aa, Homo sapiens
FVELYGPSMRPLFDF

SEQ ID NO: 47109 - protein, 9 aa, Homo sapiens
VELYGPSMR

SEQ ID NO: 47110 - protein, 15 aa, Homo sapiens
VELYGPSMRPLFDFS

SEQ ID NO: 47111 - protein, 9 aa, Homo sapiens
VELYGPSMR

SEQ ID NO: 47112 - protein, 15 aa, Homo sapiens
AAGPALSPVPPVVHL

SEQ ID NO: 47113 - protein, 9 aa, Homo sapiens
LSPVPPVVH

SEQ ID NO: 47114 - protein, 15 aa, Homo sapiens
AAAGPALSPVPPVVH

SEQ ID NO: 47115 - protein, 9 aa, Homo sapiens
ALSPVPPVV

SEQ ID NO: 47116 - protein, 15 aa, Homo sapiens
VDNIALWMTEYLNRH

SEQ ID NO: 47117 - protein, 9 aa, Homo sapiens
IALWMTEYL

SEQ ID NO: 47118 - protein, 15 aa, Homo sapiens
GPALSPVPPVVHLTL

SEQ ID NO: 47119 - protein, 9 aa, Homo sapiens
LSPVPPVVH

SEQ ID NO: 47120 - protein, 15 aa, Homo sapiens
AGPALSPVPPVVHLT

SEQ ID NO: 47121 - protein, 9 aa, Homo sapiens
LSPVPPVVH

SEQ ID NO: 47122 - protein, 15 aa, Homo sapiens
PALSPVPPVVHLTLR

SEQ ID NO: 47123 - protein, 9 aa, Homo sapiens
LSPVPPVVH

SEQ ID NO: 47124 - protein, 15 aa, Homo sapiens
DNIALWMTEYLNRHL

SEQ ID NO: 47125 - protein, 9 aa, Homo sapiens
WMTEYLNRH

SEQ ID NO: 47126 - protein, 15 aa, Homo sapiens
NIALWMTEYLNRHLH

SEQ ID NO: 47127 - protein, 9 aa, Homo sapiens
LWMTEYLNR

SEQ ID NO: 47128 - protein, 15 aa, Homo sapiens
IALWMTEYLNRHLHT

SEQ ID NO: 47129 - protein, 9 aa, Homo sapiens
WMTEYLNRH

SEQ ID NO: 47130 - protein, 15 aa, Homo sapiens
MKYIHYKLSQRGYEW

SEQ ID NO: 47131 - protein, 9 aa, Homo sapiens
YIHYKLSQR

SEQ ID NO: 47132 - protein, 15 aa, Homo sapiens
VMKYIHYKLSQRGYE

SEQ ID NO: 47133 - protein, 9 aa, Homo sapiens
YIHYKLSQR

SEQ ID NO: 47134 - protein, 15 aa, Homo sapiens
RWFLTGMTVAGVVLL

SEQ ID NO: 47135 - protein, 9 aa, Homo sapiens
LTGMTVAGV

SEQ ID NO: 47136 - protein, 15 aa, Homo sapiens
RFNRWFLTGMTVAGV

SEQ ID NO: 47137 - protein, 9 aa, Homo sapiens
FLTGMTVAG

SEQ ID NO: 47138 - protein, 15 aa, Homo sapiens
FNRWFLTGMTVAGVV

SEQ ID NO: 47139 - protein, 9 aa, Homo sapiens
LTGMTVAGV

SEQ ID NO: 47140 - protein, 15 aa, Homo sapiens
NRWFLTGMTVAGVVL

SEQ ID NO: 47141 - protein, 9 aa, Homo sapiens
LTGMTVAGV

SEQ ID NO: 47142 - protein, 15 aa, Homo sapiens
WFLTGMTVAGVVLLG

SEQ ID NO: 47143 - protein, 9 aa, Homo sapiens
LTGMTVAGV

SEQ ID NO: 47144 - protein, 15 aa, Homo sapiens
DAREVIPMAAVKQAL

SEQ ID NO: 47145 - protein, 9 aa, Homo sapiens
VIPMAAVKQ

SEQ ID NO: 47146 - protein, 15 aa, Homo sapiens
AREVIPMAAVKQALR

SEQ ID NO: 47147 - protein, 9 aa, Homo sapiens
VIPMAAVKQ

SEQ ID NO: 47148 - protein, 15 aa, Homo sapiens
REVIPMAAVKQALRE

SEQ ID NO: 47149 - protein, 9 aa, Homo sapiens
VIPMAAVKQ

SEQ ID NO: 47150 - protein, 15 aa, Homo sapiens
LDAREVIPMAAVKQA

SEQ ID NO: 47151 - protein, 9 aa, Homo sapiens
VIPMAAVKQ

SEQ ID NO: 47152 - protein, 15 aa, Homo sapiens
KEMQVLVSRIAAWMA

SEQ ID NO: 47153 - protein, 9 aa, Homo sapiens
MQVLVSRIA

SEQ ID NO: 47154 - protein, 15 aa, Homo sapiens
LTSQLHITPGTAYQS

SEQ ID NO: 47155 - protein, 9 aa, Homo sapiens
LHITPGTAY

SEQ ID NO: 47156 - protein, 15 aa, Homo sapiens
TSQLHITPGTAYQSF

SEQ ID NO: 47157 - protein, 9 aa, Homo sapiens
ITPGTAYQS

SEQ ID NO: 47158 - protein, 15 aa, Homo sapiens
SLDAREVIPMAAVKQ

SEQ ID NO: 47159 - protein, 9 aa, Homo sapiens
AREVIPMAA

SEQ ID NO: 47160 - protein, 15 aa, Homo sapiens
SQLHITPGTAYQSFE

SEQ ID NO: 47161 - protein, 9 aa, Homo sapiens
ITPGTAYQS

SEQ ID NO: 47162 - protein, 15 aa, Homo sapiens
FLTGMTVAGVVLLGS

SEQ ID NO: 47163 - protein, 9 aa, Homo sapiens
LTGMTVAGV

SEQ ID NO: 47164 - protein, 15 aa, Homo sapiens
DKEMQVLVSRIAAWM

SEQ ID NO: 47165 - protein, 9 aa, Homo sapiens
MQVLVSRIA

SEQ ID NO: 47166 - protein, 15 aa, Homo sapiens
QLHITPGTAYQSFEQ

SEQ ID NO: 47167 - protein, 9 aa, Homo sapiens
ITPGTAYQS

SEQ ID NO: 47168 - protein, 15 aa, Homo sapiens
LHITPGTAYQSFEQV

SEQ ID NO: 47169 - protein, 9 aa, Homo sapiens
ITPGTAYQS

SEQ ID NO: 47170 - protein, 15 aa, Homo sapiens
SVDKEMQVLVSRIAA

SEQ ID NO: 47171 - protein, 9 aa, Homo sapiens
MQVLVSRIA

SEQ ID NO: 47172 - protein, 15 aa, Homo sapiens
EVIPMAAVKQALREA

SEQ ID NO: 47173 - protein, 9 aa, Homo sapiens
IPMAAVKQA

SEQ ID NO: 47174 - protein, 15 aa, Homo sapiens
ESVDKEMQVLVSRIA

SEQ ID NO: 47175 - protein, 9 aa, Homo sapiens
VDKEMQVLV

SEQ ID NO: 47176 - protein, 15 aa, Homo sapiens
VDKEMQVLVSRIAAW

SEQ ID NO: 47177 - protein, 9 aa, Homo sapiens
MQVLVSRIA

SEQ ID NO: 47178 - protein, 15 aa, Homo sapiens
LTGMTVAGVVLLGSL

SEQ ID NO: 47179 - protein, 9 aa, Homo sapiens
LTGMTVAGV

SEQ ID NO: 47180 - protein, 15 aa, Homo sapiens
ERFNRWFLTGMTVAG

SEQ ID NO: 47181 - protein, 9 aa, Homo sapiens
FNRWFLTGM

SEQ ID NO: 47182 - protein, 15 aa, Homo sapiens
ETPSAINGNPSWHLA

SEQ ID NO: 47183 - protein, 9 aa, Homo sapiens
INGNPSWHL

SEQ ID NO: 47184 - protein, 15 aa, Homo sapiens
TPSAINGNPSWHLAD

SEQ ID NO: 47185 - protein, 9 aa, Homo sapiens
INGNPSWHL

SEQ ID NO: 47186 - protein, 15 aa, Homo sapiens
PSAINGNPSWHLADS

SEQ ID NO: 47187 - protein, 9 aa, Homo sapiens
INGNPSWHL

SEQ ID NO: 47188 - protein, 15 aa, Homo sapiens
SAINGNPSWHLADSP

SEQ ID NO: 47189 - protein, 9 aa, Homo sapiens
INGNPSWHL

SEQ ID NO: 47190 - protein, 15 aa, Homo sapiens
METPSAINGNPSWHL

SEQ ID NO: 47191 - protein, 9 aa, Homo sapiens
PSAINGNPS

SEQ ID NO: 47192 - protein, 15 aa, Homo sapiens
EMQVLVSRIAAWMAT

SEQ ID NO: 47193 - protein, 9 aa, Homo sapiens
MQVLVSRIA

SEQ ID NO: 47194 - protein, 15 aa, Homo sapiens
VIPMAAVKQALREAG

SEQ ID NO: 47195 - protein, 9 aa, Homo sapiens
VIPMAAVKQ

SEQ ID NO: 47196 - protein, 15 aa, Homo sapiens
MQVLVSRIAAWMATY

SEQ ID NO: 47197 - protein, 9 aa, Homo sapiens
MQVLVSRIA

SEQ ID NO: 47198 - protein, 15 aa, Homo sapiens
VLVSRIAAWMATYLN

SEQ ID NO: 47199 - protein, 9 aa, Homo sapiens
IAAWMATYL

SEQ ID NO: 47200 - protein, 15 aa, Homo sapiens
GMTVAGVVLLGSLFS

SEQ ID NO: 47201 - protein, 9 aa, Homo sapiens
MTVAGVVLL

SEQ ID NO: 47202 - protein, 15 aa, Homo sapiens
MTVAGVVLLGSLFSR

SEQ ID NO: 47203 - protein, 9 aa, Homo sapiens
VVLLGSLFS

SEQ ID NO: 47204 - protein, 15 aa, Homo sapiens
INGNPSWHLADSPAV

SEQ ID NO: 47205 - protein, 9 aa, Homo sapiens
INGNPSWHL

SEQ ID NO: 47206 - protein, 15 aa, Homo sapiens
VELYGNNAAAESRKG

SEQ ID NO: 47207 - protein, 9 aa, Homo sapiens
YGNNAAAES

SEQ ID NO: 47208 - protein, 15 aa, Homo sapiens
TVAGVVLLGSLFSRK

SEQ ID NO: 47209 - protein, 9 aa, Homo sapiens
VVLLGSLFS

SEQ ID NO: 47210 - protein, 15 aa, Homo sapiens
QVLVSRIAAWMATYL

SEQ ID NO: 47211 - protein, 9 aa, Homo sapiens
VSRIAAWMA

SEQ ID NO: 47212 - protein, 15 aa, Homo sapiens
FVELYGNNAAAESRK

SEQ ID NO: 47213 - protein, 9 aa, Homo sapiens
YGNNAAAES

SEQ ID NO: 47214 - protein, 15 aa, Homo sapiens
ELYGNNAAAESRKGQ

SEQ ID NO: 47215 - protein, 9 aa, Homo sapiens
YGNNAAAES

SEQ ID NO: 47216 - protein, 15 aa, Homo sapiens
LRYRRAFSDLTSQLH

SEQ ID NO: 47217 - protein, 9 aa, Homo sapiens
YRRAFSDLT

SEQ ID NO: 47218 - protein, 15 aa, Homo sapiens
LVSRIAAWMATYLND

SEQ ID NO: 47219 - protein, 9 aa, Homo sapiens
IAAWMATYL

SEQ ID NO: 47220 - protein, 15 aa, Homo sapiens
TFVELYGNNAAAESR

SEQ ID NO: 47221 - protein, 9 aa, Homo sapiens
YGNNAAAES

SEQ ID NO: 47222 - protein, 15 aa, Homo sapiens
DTFVELYGNNAAAES

SEQ ID NO: 47223 - protein, 9 aa, Homo sapiens
FVELYGNNA

SEQ ID NO: 47224 - protein, 15 aa, Homo sapiens
NPSWHLADSPAVNGA

SEQ ID NO: 47225 - protein, 9 aa, Homo sapiens
WHLADSPAV

SEQ ID NO: 47226 - protein, 15 aa, Homo sapiens
PSWHLADSPAVNGAT

SEQ ID NO: 47227 - protein, 9 aa, Homo sapiens
WHLADSPAV

SEQ ID NO: 47228 - protein, 15 aa, Homo sapiens
TGMTVAGVVLLGSLF

SEQ ID NO: 47229 - protein, 9 aa, Homo sapiens
MTVAGVVLL

SEQ ID NO: 47230 - protein, 15 aa, Homo sapiens
VSRIAAWMATYLNDH

SEQ ID NO: 47231 - protein, 9 aa, Homo sapiens
IAAWMATYL

SEQ ID NO: 47232 - protein, 15 aa, Homo sapiens
GNPSWHLADSPAVNG

SEQ ID NO: 47233 - protein, 9 aa, Homo sapiens
WHLADSPAV

SEQ ID NO: 47234 - protein, 15 aa, Homo sapiens
LADSPAVNGATGHSS

SEQ ID NO: 47235 - protein, 9 aa, Homo sapiens
LADSPAVNG

SEQ ID NO: 47236 - protein, 15 aa, Homo sapiens
ELRYRRAFSDLTSQL

SEQ ID NO: 47237 - protein, 9 aa, Homo sapiens
YRRAFSDLT

SEQ ID NO: 47238 - protein, 15 aa, Homo sapiens
SRIAAWMATYLNDHL

SEQ ID NO: 47239 - protein, 9 aa, Homo sapiens
IAAWMATYL

SEQ ID NO: 47240 - protein, 15 aa, Homo sapiens
FELRYRRAFSDLTSQ

SEQ ID NO: 47241 - protein, 9 aa, Homo sapiens
YRRAFSDLT

SEQ ID NO: 47242 - protein, 15 aa, Homo sapiens
EFELRYRRAFSDLTS

SEQ ID NO: 47243 - protein, 9 aa, Homo sapiens
YRRAFSDLT

SEQ ID NO: 47244 - protein, 15 aa, Homo sapiens
DEFELRYRRAFSDLT

SEQ ID NO: 47245 - protein, 9 aa, Homo sapiens
LRYRRAFSD

SEQ ID NO: 47246 - protein, 15 aa, Homo sapiens
IVAFFSFGGALCVES

SEQ ID NO: 47247 - protein, 9 aa, Homo sapiens
FSFGGALCV

SEQ ID NO: 47248 - protein, 15 aa, Homo sapiens
SWHLADSPAVNGATG

SEQ ID NO: 47249 - protein, 9 aa, Homo sapiens
LADSPAVNG

SEQ ID NO: 47250 - protein, 15 aa, Homo sapiens
DSPAVNGATGHSSSL

SEQ ID NO: 47251 - protein, 9 aa, Homo sapiens
VNGATGHSS

SEQ ID NO: 47252 - protein, 15 aa, Homo sapiens
SPAVNGATGHSSSLD

SEQ ID NO: 47253 - protein, 9 aa, Homo sapiens
VNGATGHSS

SEQ ID NO: 47254 - protein, 15 aa, Homo sapiens
VAFFSFGGALCVESV

SEQ ID NO: 47255 - protein, 9 aa, Homo sapiens
FSFGGALCV

SEQ ID NO: 47256 - protein, 15 aa, Homo sapiens
ADSPAVNGATGHSSS

SEQ ID NO: 47257 - protein, 9 aa, Homo sapiens
VNGATGHSS

SEQ ID NO: 47258 - protein, 15 aa, Homo sapiens
AFFSFGGALCVESVD

SEQ ID NO: 47259 - protein, 9 aa, Homo sapiens
FSFGGALCV

SEQ ID NO: 47260 - protein, 15 aa, Homo sapiens
WHLADSPAVNGATGH

SEQ ID NO: 47261 - protein, 9 aa, Homo sapiens
LADSPAVNG

SEQ ID NO: 47262 - protein, 15 aa, Homo sapiens
HITPGTAYQSFEQVV

SEQ ID NO: 47263 - protein, 9 aa, Homo sapiens
ITPGTAYQS

SEQ ID NO: 47264 - protein, 15 aa, Homo sapiens
ITPGTAYQSFEQVVN

SEQ ID NO: 47265 - protein, 9 aa, Homo sapiens
ITPGTAYQS

SEQ ID NO: 47266 - protein, 15 aa, Homo sapiens
AINGNPSWHLADSPA

SEQ ID NO: 47267 - protein, 9 aa, Homo sapiens
INGNPSWHL

SEQ ID NO: 47268 - protein, 15 aa, Homo sapiens
PAVNGATGHSSSLDA

SEQ ID NO: 47269 - protein, 9 aa, Homo sapiens
VNGATGHSS

SEQ ID NO: 47270 - protein, 15 aa, Homo sapiens
RYRRAFSDLTSQLHI

SEQ ID NO: 47271 - protein, 9 aa, Homo sapiens
YRRAFSDLT

SEQ ID NO: 47272 - protein, 15 aa, Homo sapiens
YRRAFSDLTSQLHIT

SEQ ID NO: 47273 - protein, 9 aa, Homo sapiens
YRRAFSDLT

SEQ ID NO: 47274 - protein, 15 aa, Homo sapiens
NGNPSWHLADSPAVN

SEQ ID NO: 47275 - protein, 9 aa, Homo sapiens
WHLADSPAV

SEQ ID NO: 47276 - protein, 15 aa, Homo sapiens
GRIVAFFSFGGALCV

SEQ ID NO: 47277 - protein, 9 aa, Homo sapiens
IVAFFSFGG

SEQ ID NO: 47278 - protein, 15 aa, Homo sapiens
LYGNNAAAESRKGQE

SEQ ID NO: 47279 - protein, 9 aa, Homo sapiens
YGNNAAAES

SEQ ID NO: 47280 - protein, 15 aa, Homo sapiens
RIAAWMATYLNDHLE

SEQ ID NO: 47281 - protein, 9 aa, Homo sapiens
AAWMATYLN

SEQ ID NO: 47282 - protein, 15 aa, Homo sapiens
YGNNAAAESRKGQER

SEQ ID NO: 47283 - protein, 9 aa, Homo sapiens
YGNNAAAES

SEQ ID NO: 47284 - protein, 15 aa, Homo sapiens
RIVAFFSFGGALCVE

SEQ ID NO: 47285 - protein, 9 aa, Homo sapiens
FSFGGALCV

SEQ ID NO: 47286 - protein, 15 aa, Homo sapiens
FRDGVNWGRIVAFFS

SEQ ID NO: 47287 - protein, 9 aa, Homo sapiens
VNWGRIVAF

SEQ ID NO: 47288 - protein, 15 aa, Homo sapiens
FFSFGGALCVESVDK

SEQ ID NO: 47289 - protein, 9 aa, Homo sapiens
FSFGGALCV

SEQ ID NO: 47290 - protein, 15 aa, Homo sapiens
FSFGGALCVESVDKE

SEQ ID NO: 47291 - protein, 9 aa, Homo sapiens
FSFGGALCV

SEQ ID NO: 47292 - protein, 15 aa, Homo sapiens
RDGVNWGRIVAFFSF

SEQ ID NO: 47293 - protein, 9 aa, Homo sapiens
VNWGRIVAF

SEQ ID NO: 47294 - protein, 15 aa, Homo sapiens
DGVNWGRIVAFFSFG

SEQ ID NO: 47295 - protein, 9 aa, Homo sapiens
VNWGRIVAF

SEQ ID NO: 47296 - protein, 15 aa, Homo sapiens
IPMAAVKQALREAGD

SEQ ID NO: 47297 - protein, 9 aa, Homo sapiens
IPMAAVKQA

SEQ ID NO: 47298 - protein, 15 aa, Homo sapiens
RRAFSDLTSQLHITP

SEQ ID NO: 47299 - protein, 9 aa, Homo sapiens
FSDLTSQLH

SEQ ID NO: 47300 - protein, 15 aa, Homo sapiens
RAFSDLTSQLHITPG

SEQ ID NO: 47301 - protein, 9 aa, Homo sapiens
FSDLTSQLH

SEQ ID NO: 47302 - protein, 15 aa, Homo sapiens
HLADSPAVNGATGHS

SEQ ID NO: 47303 - protein, 9 aa, Homo sapiens
LADSPAVNG

SEQ ID NO: 47304 - protein, 15 aa, Homo sapiens
GVNWGRIVAFFSFGG

SEQ ID NO: 47305 - protein, 9 aa, Homo sapiens
VNWGRIVAF

SEQ ID NO: 47306 - protein, 15 aa, Homo sapiens
IAAWMATYLNDHLEP

SEQ ID NO: 47307 - protein, 9 aa, Homo sapiens
IAAWMATYL

SEQ ID NO: 47308 - protein, 15 aa, Homo sapiens
AVNGATGHSSSLDAR

SEQ ID NO: 47309 - protein, 9 aa, Homo sapiens
VNGATGHSS

SEQ ID NO: 47310 - protein, 15 aa, Homo sapiens
VNWGRIVAFFSFGGA

SEQ ID NO: 47311 - protein, 9 aa, Homo sapiens
VNWGRIVAF

SEQ ID NO: 47312 - protein, 15 aa, Homo sapiens
ELVVDFLSYKLSQKG

SEQ ID NO: 47313 - protein, 9 aa, Homo sapiens
VVDFLSYKL

SEQ ID NO: 47314 - protein, 15 aa, Homo sapiens
ELFRDGVNWGRIVAF

SEQ ID NO: 47315 - protein, 9 aa, Homo sapiens
FRDGVNWGR

SEQ ID NO: 47316 - protein, 15 aa, Homo sapiens
VNGATGHSSSLDARE

SEQ ID NO: 47317 - protein, 9 aa, Homo sapiens
VNGATGHSS

SEQ ID NO: 47318 - protein, 15 aa, Homo sapiens
LFRDGVNWGRIVAFF

SEQ ID NO: 47319 - protein, 9 aa, Homo sapiens
VNWGRIVAF

SEQ ID NO: 47320 - protein, 15 aa, Homo sapiens
LVVDFLSYKLSQKGY

SEQ ID NO: 47321 - protein, 9 aa, Homo sapiens
LSYKLSQKG

SEQ ID NO: 47322 - protein, 15 aa, Homo sapiens
VVDFLSYKLSQKGYS

SEQ ID NO: 47323 - protein, 9 aa, Homo sapiens
LSYKLSQKG

SEQ ID NO: 47324 - protein, 15 aa, Homo sapiens
QERFNRWFLTGMTVA

SEQ ID NO: 47325 - protein, 9 aa, Homo sapiens
FNRWFLTGM

SEQ ID NO: 47326 - protein, 15 aa, Homo sapiens
ESEMETPSAINGNPS

SEQ ID NO: 47327 - protein, 9 aa, Homo sapiens
METPSAING

SEQ ID NO: 47328 - protein, 15 aa, Homo sapiens
GTESEMETPSAINGN

SEQ ID NO: 47329 - protein, 9 aa, Homo sapiens
METPSAING

SEQ ID NO: 47330 - protein, 15 aa, Homo sapiens
DLTSQLHITPGTAYQ

SEQ ID NO: 47331 - protein, 9 aa, Homo sapiens
LHITPGTAY

SEQ ID NO: 47332 - protein, 15 aa, Homo sapiens
EGTESEMETPSAING

SEQ ID NO: 47333 - protein, 9 aa, Homo sapiens
ESEMETPSA

SEQ ID NO: 47334 - protein, 15 aa, Homo sapiens
SEMETPSAINGNPSW

SEQ ID NO: 47335 - protein, 9 aa, Homo sapiens
METPSAING

SEQ ID NO: 47336 - protein, 15 aa, Homo sapiens
SDLTSQLHITPGTAY

SEQ ID NO: 47337 - protein, 9 aa, Homo sapiens
SQLHITPGT

SEQ ID NO: 47338 - protein, 15 aa, Homo sapiens
VDFLSYKLSQKGYSW

SEQ ID NO: 47339 - protein, 9 aa, Homo sapiens
LSYKLSQKG

SEQ ID NO: 47340 - protein, 15 aa, Homo sapiens
TESEMETPSAINGNP

SEQ ID NO: 47341 - protein, 9 aa, Homo sapiens
METPSAING

SEQ ID NO: 47342 - protein, 15 aa, Homo sapiens
AAWMATYLNDHLEPW

SEQ ID NO: 47343 - protein, 9 aa, Homo sapiens
AAWMATYLN

SEQ ID NO: 47344 - protein, 15 aa, Homo sapiens
DFLSYKLSQKGYSWS

SEQ ID NO: 47345 - protein, 9 aa, Homo sapiens
LSYKLSQKG

SEQ ID NO: 47346 - protein, 15 aa, Homo sapiens
AFSDLTSQLHITPGT

SEQ ID NO: 47347 - protein, 9 aa, Homo sapiens
FSDLTSQLH

SEQ ID NO: 47348 - protein, 15 aa, Homo sapiens
FSDLTSQLHITPGTA

SEQ ID NO: 47349 - protein, 9 aa, Homo sapiens
FSDLTSQLH

SEQ ID NO: 47350 - protein, 15 aa, Homo sapiens
WGRIVAFFSFGGALC

SEQ ID NO: 47351 - protein, 9 aa, Homo sapiens
IVAFFSFGG

SEQ ID NO: 47352 - protein, 15 aa, Homo sapiens
GQERFNRWFLTGMTV

SEQ ID NO: 47353 - protein, 9 aa, Homo sapiens
FNRWFLTGM

SEQ ID NO: 47354 - protein, 15 aa, Homo sapiens
LRYRRAFSDLTSQLH

SEQ ID NO: 47355 - protein, 9 aa, Homo sapiens
YRRAFSDLT

SEQ ID NO: 47356 - protein, 15 aa, Homo sapiens
FELRYRRAFSDLTSQ

SEQ ID NO: 47357 - protein, 9 aa, Homo sapiens
YRRAFSDLT

SEQ ID NO: 47358 - protein, 15 aa, Homo sapiens
EFELRYRRAFSDLTS

SEQ ID NO: 47359 - protein, 9 aa, Homo sapiens
YRRAFSDLT

SEQ ID NO: 47360 - protein, 15 aa, Homo sapiens
DEFELRYRRAFSDLT

SEQ ID NO: 47361 - protein, 9 aa, Homo sapiens
DEFELRYRR

SEQ ID NO: 47362 - protein, 15 aa, Homo sapiens
ELRYRRAFSDLTSQL

SEQ ID NO: 47363 - protein, 9 aa, Homo sapiens
YRRAFSDLT

SEQ ID NO: 47364 - protein, 15 aa, Homo sapiens
NGGWDTFVELYGNNA

SEQ ID NO: 47365 - protein, 9 aa, Homo sapiens
WDTFVELYG

SEQ ID NO: 47366 - protein, 15 aa, Homo sapiens
GGWDTFVELYGNNAA

SEQ ID NO: 47367 - protein, 9 aa, Homo sapiens
FVELYGNNA

SEQ ID NO: 47368 - protein, 15 aa, Homo sapiens
WDTFVELYGNNAAAE

SEQ ID NO: 47369 - protein, 9 aa, Homo sapiens
FVELYGNNA

SEQ ID NO: 47370 - protein, 15 aa, Homo sapiens
GWDTFVELYGNNAAA

SEQ ID NO: 47371 - protein, 9 aa, Homo sapiens
FVELYGNNA

SEQ ID NO: 47372 - protein, 15 aa, Homo sapiens
DTFVELYGNNAAAES

SEQ ID NO: 47373 - protein, 9 aa, Homo sapiens
FVELYGNNA

SEQ ID NO: 47374 - protein, 15 aa, Homo sapiens
RYRRAFSDLTSQLHI

SEQ ID NO: 47375 - protein, 9 aa, Homo sapiens
YRRAFSDLT

SEQ ID NO: 47376 - protein, 15 aa, Homo sapiens
YRRAFSDLTSQLHIT

SEQ ID NO: 47377 - protein, 9 aa, Homo sapiens
YRRAFSDLT

SEQ ID NO: 47378 - protein, 15 aa, Homo sapiens
ESVDKEMQVLVSRIA

SEQ ID NO: 47379 - protein, 9 aa, Homo sapiens
KEMQVLVSR

SEQ ID NO: 47380 - protein, 15 aa, Homo sapiens
VDKEMQVLVSRIAAW

SEQ ID NO: 47381 - protein, 9 aa, Homo sapiens
MQVLVSRIA

SEQ ID NO: 47382 - protein, 15 aa, Homo sapiens
ERFNRWFLTGMTVAG

SEQ ID NO: 47383 - protein, 9 aa, Homo sapiens
WFLTGMTVA

SEQ ID NO: 47384 - protein, 15 aa, Homo sapiens
SVDKEMQVLVSRIAA

SEQ ID NO: 47385 - protein, 9 aa, Homo sapiens
MQVLVSRIA

SEQ ID NO: 47386 - protein, 15 aa, Homo sapiens
RFNRWFLTGMTVAGV

SEQ ID NO: 47387 - protein, 9 aa, Homo sapiens
FLTGMTVAG

SEQ ID NO: 47388 - protein, 15 aa, Homo sapiens
FNRWFLTGMTVAGVV

SEQ ID NO: 47389 - protein, 9 aa, Homo sapiens
FLTGMTVAG

SEQ ID NO: 47390 - protein, 15 aa, Homo sapiens
KEMQVLVSRIAAWMA

SEQ ID NO: 47391 - protein, 9 aa, Homo sapiens
MQVLVSRIA

SEQ ID NO: 47392 - protein, 15 aa, Homo sapiens
DKEMQVLVSRIAAWM

SEQ ID NO: 47393 - protein, 9 aa, Homo sapiens
MQVLVSRIA

SEQ ID NO: 47394 - protein, 15 aa, Homo sapiens
NRWFLTGMTVAGVVL

SEQ ID NO: 47395 - protein, 9 aa, Homo sapiens
FLTGMTVAG

SEQ ID NO: 47396 - protein, 15 aa, Homo sapiens
AAWMATYLNDHLEPW

SEQ ID NO: 47397 - protein, 9 aa, Homo sapiens
WMATYLNDH

SEQ ID NO: 47398 - protein, 15 aa, Homo sapiens
SRIAAWMATYLNDHL

SEQ ID NO: 47399 - protein, 9 aa, Homo sapiens
WMATYLNDH

SEQ ID NO: 47400 - protein, 15 aa, Homo sapiens
RIAAWMATYLNDHLE

SEQ ID NO: 47401 - protein, 9 aa, Homo sapiens
WMATYLNDH

SEQ ID NO: 47402 - protein, 15 aa, Homo sapiens
IAAWMATYLNDHLEP

SEQ ID NO: 47403 - protein, 9 aa, Homo sapiens
WMATYLNDH

SEQ ID NO: 47404 - protein, 15 aa, Homo sapiens
VSRIAAWMATYLNDH

SEQ ID NO: 47405 - protein, 9 aa, Homo sapiens
AAWMATYLN

SEQ ID NO: 47406 - protein, 15 aa, Homo sapiens
TVAGVVLLGSLFSRK

SEQ ID NO: 47407 - protein, 9 aa, Homo sapiens
VVLLGSLFS

SEQ ID NO: 47408 - protein, 15 aa, Homo sapiens
RFNRWFLTGMTVAGV

SEQ ID NO: 47409 - protein, 9 aa, Homo sapiens
FLTGMTVAG

SEQ ID NO: 47410 - protein, 15 aa, Homo sapiens
FNRWFLTGMTVAGVV

SEQ ID NO: 47411 - protein, 9 aa, Homo sapiens
FLTGMTVAG

SEQ ID NO: 47412 - protein, 15 aa, Homo sapiens
NRWFLTGMTVAGVVL

SEQ ID NO: 47413 - protein, 9 aa, Homo sapiens
FLTGMTVAG

SEQ ID NO: 47414 - protein, 15 aa, Homo sapiens
ERFNRWFLTGMTVAG

SEQ ID NO: 47415 - protein, 9 aa, Homo sapiens
WFLTGMTVA

SEQ ID NO: 47416 - protein, 15 aa, Homo sapiens
AWMATYLNDHLEPWI

SEQ ID NO: 47417 - protein, 9 aa, Homo sapiens
WMATYLNDH

SEQ ID NO: 47418 - protein, 15 aa, Homo sapiens
RWFLTGMTVAGVVLL

SEQ ID NO: 47419 - protein, 9 aa, Homo sapiens
FLTGMTVAG

SEQ ID NO: 47420 - protein, 15 aa, Homo sapiens
DTFVELYGNNAAAES

SEQ ID NO: 47421 - protein, 9 aa, Homo sapiens
FVELYGNNA

SEQ ID NO: 47422 - protein, 15 aa, Homo sapiens
GWDTFVELYGNNAAA

SEQ ID NO: 47423 - protein, 9 aa, Homo sapiens
FVELYGNNA

SEQ ID NO: 47424 - protein, 15 aa, Homo sapiens
WMATYLNDHLEPWIQ

SEQ ID NO: 47425 - protein, 9 aa, Homo sapiens
WMATYLNDH

SEQ ID NO: 47426 - protein, 15 aa, Homo sapiens
WDTFVELYGNNAAAE

SEQ ID NO: 47427 - protein, 9 aa, Homo sapiens
FVELYGNNA

SEQ ID NO: 47428 - protein, 15 aa, Homo sapiens
GGWDTFVELYGNNAA

SEQ ID NO: 47429 - protein, 9 aa, Homo sapiens
FVELYGNNA

SEQ ID NO: 47430 - protein, 15 aa, Homo sapiens
NGGWDTFVELYGNNA

SEQ ID NO: 47431 - protein, 9 aa, Homo sapiens
GWDTFVELY

SEQ ID NO: 47432 - protein, 15 aa, Homo sapiens
TAYQSFEQVVNELFR

SEQ ID NO: 47433 - protein, 9 aa, Homo sapiens
YQSFEQVVN

SEQ ID NO: 47434 - protein, 15 aa, Homo sapiens
GTAYQSFEQVVNELF

SEQ ID NO: 47435 - protein, 9 aa, Homo sapiens
YQSFEQVVN

SEQ ID NO: 47436 - protein, 15 aa, Homo sapiens
TPGTAYQSFEQVVNE

SEQ ID NO: 47437 - protein, 9 aa, Homo sapiens
YQSFEQVVN

SEQ ID NO: 47438 - protein, 15 aa, Homo sapiens
PGTAYQSFEQVVNEL

SEQ ID NO: 47439 - protein, 9 aa, Homo sapiens
YQSFEQVVN

SEQ ID NO: 47440 - protein, 15 aa, Homo sapiens
ITPGTAYQSFEQVVN

SEQ ID NO: 47441 - protein, 9 aa, Homo sapiens
AYQSFEQVV

SEQ ID NO: 47442 - protein, 15 aa, Homo sapiens
VSRIAAWMATYLNDH

SEQ ID NO: 47443 - protein, 9 aa, Homo sapiens
AAWMATYLN

SEQ ID NO: 47444 - protein, 15 aa, Homo sapiens
LVSRIAAWMATYLND

SEQ ID NO: 47445 - protein, 9 aa, Homo sapiens
AAWMATYLN

SEQ ID NO: 47446 - protein, 15 aa, Homo sapiens
VLVSRIAAWMATYLN

SEQ ID NO: 47447 - protein, 9 aa, Homo sapiens
IAAWMATYL

SEQ ID NO: 47448 - protein, 15 aa, Homo sapiens
SRIAAWMATYLNDHL

SEQ ID NO: 47449 - protein, 9 aa, Homo sapiens
AAWMATYLN

SEQ ID NO: 47450 - protein, 15 aa, Homo sapiens
LRYRRAFSDLTSQLH

SEQ ID NO: 47451 - protein, 9 aa, Homo sapiens
YRRAFSDLT

SEQ ID NO: 47452 - protein, 15 aa, Homo sapiens
FELRYRRAFSDLTSQ

SEQ ID NO: 47453 - protein, 9 aa, Homo sapiens
YRRAFSDLT

SEQ ID NO: 47454 - protein, 15 aa, Homo sapiens
EFELRYRRAFSDLTS

SEQ ID NO: 47455 - protein, 9 aa, Homo sapiens
YRRAFSDLT

SEQ ID NO: 47456 - protein, 15 aa, Homo sapiens
RIAAWMATYLNDHLE

SEQ ID NO: 47457 - protein, 9 aa, Homo sapiens
AAWMATYLN

SEQ ID NO: 47458 - protein, 15 aa, Homo sapiens
AYQSFEQVVNELFRD

SEQ ID NO: 47459 - protein, 9 aa, Homo sapiens
YQSFEQVVN

SEQ ID NO: 47460 - protein, 15 aa, Homo sapiens
YQSFEQVVNELFRDG

SEQ ID NO: 47461 - protein, 9 aa, Homo sapiens
YQSFEQVVN

SEQ ID NO: 47462 - protein, 15 aa, Homo sapiens
ELRYRRAFSDLTSQL

SEQ ID NO: 47463 - protein, 9 aa, Homo sapiens
YRRAFSDLT

SEQ ID NO: 47464 - protein, 15 aa, Homo sapiens
SQKGYSWSQFSDVEE

SEQ ID NO: 47465 - protein, 9 aa, Homo sapiens
GYSWSQFSD

SEQ ID NO: 47466 - protein, 15 aa, Homo sapiens
DEFELRYRRAFSDLT

SEQ ID NO: 47467 - protein, 9 aa, Homo sapiens
LRYRRAFSD

SEQ ID NO: 47468 - protein, 15 aa, Homo sapiens
QKGYSWSQFSDVEEN

SEQ ID NO: 47469 - protein, 9 aa, Homo sapiens
WSQFSDVEE

SEQ ID NO: 47470 - protein, 15 aa, Homo sapiens
RYRRAFSDLTSQLHI

SEQ ID NO: 47471 - protein, 9 aa, Homo sapiens
YRRAFSDLT

SEQ ID NO: 47472 - protein, 15 aa, Homo sapiens
KGYSWSQFSDVEENR

SEQ ID NO: 47473 - protein, 9 aa, Homo sapiens
WSQFSDVEE

SEQ ID NO: 47474 - protein, 15 aa, Homo sapiens
IAAWMATYLNDHLEP

SEQ ID NO: 47475 - protein, 9 aa, Homo sapiens
AAWMATYLN

SEQ ID NO: 47476 - protein, 15 aa, Homo sapiens
GYSWSQFSDVEENRT

SEQ ID NO: 47477 - protein, 9 aa, Homo sapiens
WSQFSDVEE

SEQ ID NO: 47478 - protein, 15 aa, Homo sapiens
KEMQVLVSRIAAWMA

SEQ ID NO: 47479 - protein, 9 aa, Homo sapiens
VLVSRIAAW

SEQ ID NO: 47480 - protein, 15 aa, Homo sapiens
MQVLVSRIAAWMATY

SEQ ID NO: 47481 - protein, 9 aa, Homo sapiens
VLVSRIAAW

SEQ ID NO: 47482 - protein, 15 aa, Homo sapiens
EMQVLVSRIAAWMAT

SEQ ID NO: 47483 - protein, 9 aa, Homo sapiens
VLVSRIAAW

SEQ ID NO: 47484 - protein, 15 aa, Homo sapiens
DKEMQVLVSRIAAWM

SEQ ID NO: 47485 - protein, 9 aa, Homo sapiens
VLVSRIAAW

SEQ ID NO: 47486 - protein, 15 aa, Homo sapiens
QVLVSRIAAWMATYL

SEQ ID NO: 47487 - protein, 9 aa, Homo sapiens
VLVSRIAAW

SEQ ID NO: 47488 - protein, 15 aa, Homo sapiens
ETPSAINGNPSWHLA

SEQ ID NO: 47489 - protein, 9 aa, Homo sapiens
INGNPSWHL

SEQ ID NO: 47490 - protein, 15 aa, Homo sapiens
METPSAINGNPSWHL

SEQ ID NO: 47491 - protein, 9 aa, Homo sapiens
AINGNPSWH

SEQ ID NO: 47492 - protein, 15 aa, Homo sapiens
VDKEMQVLVSRIAAW

SEQ ID NO: 47493 - protein, 9 aa, Homo sapiens
MQVLVSRIA

SEQ ID NO: 47494 - protein, 15 aa, Homo sapiens
TPSAINGNPSWHLAD

SEQ ID NO: 47495 - protein, 9 aa, Homo sapiens
INGNPSWHL

SEQ ID NO: 47496 - protein, 15 aa, Homo sapiens
PSAINGNPSWHLADS

SEQ ID NO: 47497 - protein, 9 aa, Homo sapiens
INGNPSWHL

SEQ ID NO: 47498 - protein, 15 aa, Homo sapiens
VLVSRIAAWMATYLN

SEQ ID NO: 47499 - protein, 9 aa, Homo sapiens
VLVSRIAAW

SEQ ID NO: 47500 - protein, 15 aa, Homo sapiens
SAINGNPSWHLADSP

SEQ ID NO: 47501 - protein, 9 aa, Homo sapiens
INGNPSWHL

SEQ ID NO: 47502 - protein, 15 aa, Homo sapiens
LRYRRAFSDLTSQLH

SEQ ID NO: 47503 - protein, 9 aa, Homo sapiens
YRRAFSDLT

SEQ ID NO: 47504 - protein, 15 aa, Homo sapiens
RYRRAFSDLTSQLHI

SEQ ID NO: 47505 - protein, 9 aa, Homo sapiens
FSDLTSQLH

SEQ ID NO: 47506 - protein, 15 aa, Homo sapiens
YRRAFSDLTSQLHIT

SEQ ID NO: 47507 - protein, 9 aa, Homo sapiens
FSDLTSQLH

SEQ ID NO: 47508 - protein, 15 aa, Homo sapiens
INGNPSWHLADSPAV

SEQ ID NO: 47509 - protein, 9 aa, Homo sapiens
INGNPSWHL

SEQ ID NO: 47510 - protein, 15 aa, Homo sapiens
PSWHLADSPAVNGAT

SEQ ID NO: 47511 - protein, 9 aa, Homo sapiens
WHLADSPAV

SEQ ID NO: 47512 - protein, 15 aa, Homo sapiens
NPSWHLADSPAVNGA

SEQ ID NO: 47513 - protein, 9 aa, Homo sapiens
WHLADSPAV

SEQ ID NO: 47514 - protein, 15 aa, Homo sapiens
GNPSWHLADSPAVNG

SEQ ID NO: 47515 - protein, 9 aa, Homo sapiens
WHLADSPAV

SEQ ID NO: 47516 - protein, 15 aa, Homo sapiens
INGNPSWHLADSPAV

SEQ ID NO: 47517 - protein, 9 aa, Homo sapiens
SWHLADSPA

SEQ ID NO: 47518 - protein, 15 aa, Homo sapiens
NGNPSWHLADSPAVN

SEQ ID NO: 47519 - protein, 9 aa, Homo sapiens
WHLADSPAV

SEQ ID NO: 47520 - protein, 15 aa, Homo sapiens
SWHLADSPAVNGATG

SEQ ID NO: 47521 - protein, 9 aa, Homo sapiens
WHLADSPAV

SEQ ID NO: 47522 - protein, 15 aa, Homo sapiens
WHLADSPAVNGATGH

SEQ ID NO: 47523 - protein, 9 aa, Homo sapiens
WHLADSPAV

SEQ ID NO: 47524 - protein, 15 aa, Homo sapiens
RWFLTGMTVAGVVLL

SEQ ID NO: 47525 - protein, 9 aa, Homo sapiens
FLTGMTVAG

SEQ ID NO: 47526 - protein, 15 aa, Homo sapiens
WFLTGMTVAGVVLLG

SEQ ID NO: 47527 - protein, 9 aa, Homo sapiens
MTVAGVVLL

SEQ ID NO: 47528 - protein, 15 aa, Homo sapiens
FLTGMTVAGVVLLGS

SEQ ID NO: 47529 - protein, 9 aa, Homo sapiens
MTVAGVVLL

SEQ ID NO: 47530 - protein, 15 aa, Homo sapiens
KEMQVLVSRIAAWMA

SEQ ID NO: 47531 - protein, 9 aa, Homo sapiens
MQVLVSRIA

SEQ ID NO: 47532 - protein, 15 aa, Homo sapiens
FRDGVNWGRIVAFFS

SEQ ID NO: 47533 - protein, 9 aa, Homo sapiens
GVNWGRIVA

SEQ ID NO: 47534 - protein, 15 aa, Homo sapiens
DKEMQVLVSRIAAWM

SEQ ID NO: 47535 - protein, 9 aa, Homo sapiens
MQVLVSRIA

SEQ ID NO: 47536 - protein, 15 aa, Homo sapiens
VDKEMQVLVSRIAAW

SEQ ID NO: 47537 - protein, 9 aa, Homo sapiens
MQVLVSRIA

SEQ ID NO: 47538 - protein, 15 aa, Homo sapiens
RDGVNWGRIVAFFSF

SEQ ID NO: 47539 - protein, 9 aa, Homo sapiens
GVNWGRIVA

SEQ ID NO: 47540 - protein, 15 aa, Homo sapiens
SVDKEMQVLVSRIAA

SEQ ID NO: 47541 - protein, 9 aa, Homo sapiens
MQVLVSRIA

SEQ ID NO: 47542 - protein, 15 aa, Homo sapiens
MTVAGVVLLGSLFSR

SEQ ID NO: 47543 - protein, 9 aa, Homo sapiens
VVLLGSLFS

SEQ ID NO: 47544 - protein, 15 aa, Homo sapiens
TGMTVAGVVLLGSLF

SEQ ID NO: 47545 - protein, 9 aa, Homo sapiens
MTVAGVVLL

SEQ ID NO: 47546 - protein, 15 aa, Homo sapiens
FLTGMTVAGVVLLGS

SEQ ID NO: 47547 - protein, 9 aa, Homo sapiens
MTVAGVVLL

SEQ ID NO: 47548 - protein, 15 aa, Homo sapiens
GMTVAGVVLLGSLFS

SEQ ID NO: 47549 - protein, 9 aa, Homo sapiens
MTVAGVVLL

SEQ ID NO: 47550 - protein, 15 aa, Homo sapiens
RWFLTGMTVAGVVLL

SEQ ID NO: 47551 - protein, 9 aa, Homo sapiens
FLTGMTVAG

SEQ ID NO: 47552 - protein, 15 aa, Homo sapiens
LTGMTVAGVVLLGSL

SEQ ID NO: 47553 - protein, 9 aa, Homo sapiens
MTVAGVVLL

SEQ ID NO: 47554 - protein, 15 aa, Homo sapiens
WFLTGMTVAGVVLLG

SEQ ID NO: 47555 - protein, 9 aa, Homo sapiens
MTVAGVVLL

SEQ ID NO: 47556 - protein, 15 aa, Homo sapiens
DTFVELYGNNAAAES

SEQ ID NO: 47557 - protein, 9 aa, Homo sapiens
VELYGNNAA

SEQ ID NO: 47558 - protein, 15 aa, Homo sapiens
TFVELYGNNAAAESR

SEQ ID NO: 47559 - protein, 9 aa, Homo sapiens
YGNNAAAES

SEQ ID NO: 47560 - protein, 15 aa, Homo sapiens
FVELYGNNAAAESRK

SEQ ID NO: 47561 - protein, 9 aa, Homo sapiens
YGNNAAAES

SEQ ID NO: 47562 - protein, 15 aa, Homo sapiens
VELYGNNAAAESRKG

SEQ ID NO: 47563 - protein, 9 aa, Homo sapiens
YGNNAAAES

SEQ ID NO: 47564 - protein, 15 aa, Homo sapiens
TVAGVVLLGSLFSRK

SEQ ID NO: 47565 - protein, 9 aa, Homo sapiens
VVLLGSLFS

SEQ ID NO: 47566 - protein, 15 aa, Homo sapiens
ELYGNNAAAESRKGQ

SEQ ID NO: 47567 - protein, 9 aa, Homo sapiens
YGNNAAAES

SEQ ID NO: 47568 - protein, 15 aa, Homo sapiens
TVAGVVLLGSLFSRK

SEQ ID NO: 47569 - protein, 9 aa, Homo sapiens
VLLGSLFSR

SEQ ID NO: 47570 - protein, 15 aa, Homo sapiens
MTVAGVVLLGSLFSR

SEQ ID NO: 47571 - protein, 9 aa, Homo sapiens
VVLLGSLFS

SEQ ID NO: 47572 - protein, 15 aa, Homo sapiens
RELVVDFLSYKLSQK

SEQ ID NO: 47573 - protein, 9 aa, Homo sapiens
LVVDFLSYK

SEQ ID NO: 47574 - protein, 15 aa, Homo sapiens
ELVVDFLSYKLSQKG

SEQ ID NO: 47575 - protein, 9 aa, Homo sapiens
FLSYKLSQK

SEQ ID NO: 47576 - protein, 15 aa, Homo sapiens
KEMQVLVSRIAAWMA

SEQ ID NO: 47577 - protein, 9 aa, Homo sapiens
MQVLVSRIA

SEQ ID NO: 47578 - protein, 15 aa, Homo sapiens
DKEMQVLVSRIAAWM

SEQ ID NO: 47579 - protein, 9 aa, Homo sapiens
MQVLVSRIA

SEQ ID NO: 47580 - protein, 15 aa, Homo sapiens
RFNRWFLTGMTVAGV

SEQ ID NO: 47581 - protein, 9 aa, Homo sapiens
FNRWFLTGM

SEQ ID NO: 47582 - protein, 15 aa, Homo sapiens
SRIAAWMATYLNDHL

SEQ ID NO: 47583 - protein, 9 aa, Homo sapiens
WMATYLNDH

SEQ ID NO: 47584 - protein, 15 aa, Homo sapiens
FNRWFLTGMTVAGVV

SEQ ID NO: 47585 - protein, 9 aa, Homo sapiens
LTGMTVAGV

SEQ ID NO: 47586 - protein, 15 aa, Homo sapiens
LVVDFLSYKLSQKGY

SEQ ID NO: 47587 - protein, 9 aa, Homo sapiens
FLSYKLSQK

SEQ ID NO: 47588 - protein, 15 aa, Homo sapiens
NRELVVDFLSYKLSQ

SEQ ID NO: 47589 - protein, 9 aa, Homo sapiens
LVVDFLSYK

SEQ ID NO: 47590 - protein, 15 aa, Homo sapiens
VNWGRIVAFFSFGGA

SEQ ID NO: 47591 - protein, 9 aa, Homo sapiens
IVAFFSFGG

SEQ ID NO: 47592 - protein, 15 aa, Homo sapiens
SNRELVVDFLSYKLS

SEQ ID NO: 47593 - protein, 9 aa, Homo sapiens
LVVDFLSYK

SEQ ID NO: 47594 - protein, 15 aa, Homo sapiens
MQVLVSRIAAWMATY

SEQ ID NO: 47595 - protein, 9 aa, Homo sapiens
LVSRIAAWM

SEQ ID NO: 47596 - protein, 15 aa, Homo sapiens
VSRIAAWMATYLNDH

SEQ ID NO: 47597 - protein, 9 aa, Homo sapiens
IAAWMATYL

SEQ ID NO: 47598 - protein, 15 aa, Homo sapiens
EMQVLVSRIAAWMAT

SEQ ID NO: 47599 - protein, 9 aa, Homo sapiens
VLVSRIAAW

SEQ ID NO: 47600 - protein, 15 aa, Homo sapiens
RIAAWMATYLNDHLE

SEQ ID NO: 47601 - protein, 9 aa, Homo sapiens
WMATYLNDH

SEQ ID NO: 47602 - protein, 15 aa, Homo sapiens
NELFRDGVNWGRIVA

SEQ ID NO: 47603 - protein, 9 aa, Homo sapiens
LFRDGVNWG

SEQ ID NO: 47604 - protein, 15 aa, Homo sapiens
QVVNELFRDGVNWGR

SEQ ID NO: 47605 - protein, 9 aa, Homo sapiens
LFRDGVNWG

SEQ ID NO: 47606 - protein, 15 aa, Homo sapiens
VVNELFRDGVNWGRI

SEQ ID NO: 47607 - protein, 9 aa, Homo sapiens
LFRDGVNWG

SEQ ID NO: 47608 - protein, 15 aa, Homo sapiens
IAAWMATYLNDHLEP

SEQ ID NO: 47609 - protein, 9 aa, Homo sapiens
WMATYLNDH

SEQ ID NO: 47610 - protein, 15 aa, Homo sapiens
WGRIVAFFSFGGALC

SEQ ID NO: 47611 - protein, 9 aa, Homo sapiens
IVAFFSFGG

SEQ ID NO: 47612 - protein, 15 aa, Homo sapiens
NWGRIVAFFSFGGAL

SEQ ID NO: 47613 - protein, 9 aa, Homo sapiens
IVAFFSFGG

SEQ ID NO: 47614 - protein, 15 aa, Homo sapiens
QERFNRWFLTGMTVA

SEQ ID NO: 47615 - protein, 9 aa, Homo sapiens
FNRWFLTGM

SEQ ID NO: 47616 - protein, 15 aa, Homo sapiens
ERFNRWFLTGMTVAG

SEQ ID NO: 47617 - protein, 9 aa, Homo sapiens
FNRWFLTGM

SEQ ID NO: 47618 - protein, 15 aa, Homo sapiens
GRIVAFFSFGGALCV

SEQ ID NO: 47619 - protein, 9 aa, Homo sapiens
IVAFFSFGG

SEQ ID NO: 47620 - protein, 15 aa, Homo sapiens
VVDFLSYKLSQKGYS

SEQ ID NO: 47621 - protein, 9 aa, Homo sapiens
FLSYKLSQK

SEQ ID NO: 47622 - protein, 15 aa, Homo sapiens
VDKEMQVLVSRIAAW

SEQ ID NO: 47623 - protein, 9 aa, Homo sapiens
MQVLVSRIA

SEQ ID NO: 47624 - protein, 15 aa, Homo sapiens
AAWMATYLNDHLEPW

SEQ ID NO: 47625 - protein, 9 aa, Homo sapiens
WMATYLNDH

SEQ ID NO: 47626 - protein, 15 aa, Homo sapiens
QSNRELVVDFLSYKL

SEQ ID NO: 47627 - protein, 9 aa, Homo sapiens
LVVDFLSYK

SEQ ID NO: 47628 - protein, 15 aa, Homo sapiens
VNELFRDGVNWGRIV

SEQ ID NO: 47629 - protein, 9 aa, Homo sapiens
LFRDGVNWG

SEQ ID NO: 47630 - protein, 15 aa, Homo sapiens
GVNWGRIVAFFSFGG

SEQ ID NO: 47631 - protein, 9 aa, Homo sapiens
VNWGRIVAF

SEQ ID NO: 47632 - protein, 15 aa, Homo sapiens
ELFRDGVNWGRIVAF

SEQ ID NO: 47633 - protein, 9 aa, Homo sapiens
LFRDGVNWG

SEQ ID NO: 47634 - protein, 15 aa, Homo sapiens
GMTVAGVVLLGSLFS

SEQ ID NO: 47635 - protein, 9 aa, Homo sapiens
VAGVVLLGS

SEQ ID NO: 47636 - protein, 15 aa, Homo sapiens
EQVVNELFRDGVNWG

SEQ ID NO: 47637 - protein, 9 aa, Homo sapiens
VVNELFRDG

SEQ ID NO: 47638 - protein, 15 aa, Homo sapiens
RIVAFFSFGGALCVE

SEQ ID NO: 47639 - protein, 9 aa, Homo sapiens
IVAFFSFGG

SEQ ID NO: 47640 - protein, 15 aa, Homo sapiens
NRWFLTGMTVAGVVL

SEQ ID NO: 47641 - protein, 9 aa, Homo sapiens
LTGMTVAGV

SEQ ID NO: 47642 - protein, 15 aa, Homo sapiens
LRYRRAFSDLTSQLH

SEQ ID NO: 47643 - protein, 9 aa, Homo sapiens
YRRAFSDLT

SEQ ID NO: 47644 - protein, 15 aa, Homo sapiens
RYRRAFSDLTSQLHI

SEQ ID NO: 47645 - protein, 9 aa, Homo sapiens
FSDLTSQLH

SEQ ID NO: 47646 - protein, 8 aa, Homo sapiens
MGAPTLPP

SEQ ID NO: 47647 - protein, 8 aa, Homo sapiens
GAPTLPPA

SEQ ID NO: 47648 - protein, 8 aa, Homo sapiens
APTLPPAW

SEQ ID NO: 47649 - protein, 8 aa, Homo sapiens
PTLPPAWQ

SEQ ID NO: 47650 - protein, 8 aa, Homo sapiens
TLPPAWQP

SEQ ID NO: 47651 - protein, 8 aa, Homo sapiens
LPPAWQPF

SEQ ID NO: 47652 - protein, 8 aa, Homo sapiens
PPAWQPFL

SEQ ID NO: 47653 - protein, 8 aa, Homo sapiens
PAWQPFLK

SEQ ID NO: 47654 - protein, 8 aa, Homo sapiens
AWQPFLKD

SEQ ID NO: 47655 - protein, 8 aa, Homo sapiens
WQPFLKDH

SEQ ID NO: 47656 - protein, 8 aa, Homo sapiens
QPFLKDHR

SEQ ID NO: 47657 - protein, 8 aa, Homo sapiens
PFLKDHRI

SEQ ID NO: 47658 - protein, 8 aa, Homo sapiens
FLKDHRIS

SEQ ID NO: 47659 - protein, 8 aa, Homo sapiens
LKDHRIST

SEQ ID NO: 47660 - protein, 8 aa, Homo sapiens
KDHRISTF

SEQ ID NO: 47661 - protein, 8 aa, Homo sapiens
DHRISTFK

SEQ ID NO: 47662 - protein, 8 aa, Homo sapiens
HRISTFKN

SEQ ID NO: 47663 - protein, 8 aa, Homo sapiens
RISTFKNW

SEQ ID NO: 47664 - protein, 8 aa, Homo sapiens
ISTFKNWP

SEQ ID NO: 47665 - protein, 8 aa, Homo sapiens
STFKNWPF

SEQ ID NO: 47666 - protein, 8 aa, Homo sapiens
TFKNWPFL

SEQ ID NO: 47667 - protein, 8 aa, Homo sapiens
FKNWPFLE

SEQ ID NO: 47668 - protein, 8 aa, Homo sapiens
KNWPFLEG

SEQ ID NO: 47669 - protein, 8 aa, Homo sapiens
NWPFLEGC

SEQ ID NO: 47670 - protein, 8 aa, Homo sapiens
WPFLEGCA

SEQ ID NO: 47671 - protein, 8 aa, Homo sapiens
PFLEGCAC

SEQ ID NO: 47672 - protein, 8 aa, Homo sapiens
FLEGCACT

SEQ ID NO: 47673 - protein, 8 aa, Homo sapiens
LEGCACTP

SEQ ID NO: 47674 - protein, 8 aa, Homo sapiens
EGCACTPE

SEQ ID NO: 47675 - protein, 8 aa, Homo sapiens
GCACTPER

SEQ ID NO: 47676 - protein, 8 aa, Homo sapiens
CACTPERM

SEQ ID NO: 47677 - protein, 8 aa, Homo sapiens
ACTPERMA

SEQ ID NO: 47678 - protein, 8 aa, Homo sapiens
CTPERMAE

SEQ ID NO: 47679 - protein, 8 aa, Homo sapiens
TPERMAEA

SEQ ID NO: 47680 - protein, 8 aa, Homo sapiens
PERMAEAG

SEQ ID NO: 47681 - protein, 8 aa, Homo sapiens
ERMAEAGF

SEQ ID NO: 47682 - protein, 8 aa, Homo sapiens
RMAEAGFI

SEQ ID NO: 47683 - protein, 8 aa, Homo sapiens
MAEAGFIH

SEQ ID NO: 47684 - protein, 8 aa, Homo sapiens
AEAGFIHC

SEQ ID NO: 47685 - protein, 8 aa, Homo sapiens
EAGFIHCP

SEQ ID NO: 47686 - protein, 8 aa, Homo sapiens
AGFIHCPT

SEQ ID NO: 47687 - protein, 8 aa, Homo sapiens
GFIHCPTE

SEQ ID NO: 47688 - protein, 8 aa, Homo sapiens
FIHCPTEN

SEQ ID NO: 47689 - protein, 8 aa, Homo sapiens
IHCPTENE

SEQ ID NO: 47690 - protein, 8 aa, Homo sapiens
HCPTENEP

SEQ ID NO: 47691 - protein, 8 aa, Homo sapiens
CPTENEPD

SEQ ID NO: 47692 - protein, 8 aa, Homo sapiens
PTENEPDL

SEQ ID NO: 47693 - protein, 8 aa, Homo sapiens
TENEPDLA

SEQ ID NO: 47694 - protein, 8 aa, Homo sapiens
ENEPDLAQ

SEQ ID NO: 47695 - protein, 8 aa, Homo sapiens
NEPDLAQC

SEQ ID NO: 47696 - protein, 8 aa, Homo sapiens
EPDLAQCF

SEQ ID NO: 47697 - protein, 8 aa, Homo sapiens
PDLAQCFF

SEQ ID NO: 47698 - protein, 8 aa, Homo sapiens
DLAQCFFC

SEQ ID NO: 47699 - protein, 8 aa, Homo sapiens
LAQCFFCF

SEQ ID NO: 47700 - protein, 8 aa, Homo sapiens
AQCFFCFK

SEQ ID NO: 47701 - protein, 8 aa, Homo sapiens
QCFFCFKE

SEQ ID NO: 47702 - protein, 8 aa, Homo sapiens
CFFCFKEL

SEQ ID NO: 47703 - protein, 8 aa, Homo sapiens
FFCFKELE

SEQ ID NO: 47704 - protein, 8 aa, Homo sapiens
FCFKELEG

SEQ ID NO: 47705 - protein, 8 aa, Homo sapiens
CFKELEGW

SEQ ID NO: 47706 - protein, 8 aa, Homo sapiens
FKELEGWE

SEQ ID NO: 47707 - protein, 8 aa, Homo sapiens
KELEGWEP

SEQ ID NO: 47708 - protein, 8 aa, Homo sapiens
ELEGWEPD

SEQ ID NO: 47709 - protein, 8 aa, Homo sapiens
LEGWEPDD

SEQ ID NO: 47710 - protein, 8 aa, Homo sapiens
EGWEPDDD

SEQ ID NO: 47711 - protein, 8 aa, Homo sapiens
GWEPDDDP

SEQ ID NO: 47712 - protein, 8 aa, Homo sapiens
WEPDDDPI

SEQ ID NO: 47713 - protein, 8 aa, Homo sapiens
EPDDDPIE

SEQ ID NO: 47714 - protein, 8 aa, Homo sapiens
PDDDPIEE

SEQ ID NO: 47715 - protein, 8 aa, Homo sapiens
DDDPIEEH

SEQ ID NO: 47716 - protein, 8 aa, Homo sapiens
DDPIEEHK

SEQ ID NO: 47717 - protein, 8 aa, Homo sapiens
DPIEEHKK

SEQ ID NO: 47718 - protein, 8 aa, Homo sapiens
PIEEHKKH

SEQ ID NO: 47719 - protein, 8 aa, Homo sapiens
IEEHKKHS

SEQ ID NO: 47720 - protein, 8 aa, Homo sapiens
EEHKKHSS

SEQ ID NO: 47721 - protein, 8 aa, Homo sapiens
EHKKHSSG

SEQ ID NO: 47722 - protein, 8 aa, Homo sapiens
HKKHSSGC

SEQ ID NO: 47723 - protein, 8 aa, Homo sapiens
KKHSSGCA

SEQ ID NO: 47724 - protein, 8 aa, Homo sapiens
KHSSGCAF

SEQ ID NO: 47725 - protein, 8 aa, Homo sapiens
HSSGCAFL

SEQ ID NO: 47726 - protein, 8 aa, Homo sapiens
SSGCAFLS

SEQ ID NO: 47727 - protein, 8 aa, Homo sapiens
SGCAFLSV

SEQ ID NO: 47728 - protein, 8 aa, Homo sapiens
GCAFLSVK

SEQ ID NO: 47729 - protein, 8 aa, Homo sapiens
CAFLSVKK

SEQ ID NO: 47730 - protein, 8 aa, Homo sapiens
AFLSVKKQ

SEQ ID NO: 47731 - protein, 8 aa, Homo sapiens
FLSVKKQF

SEQ ID NO: 47732 - protein, 8 aa, Homo sapiens
LSVKKQFE

SEQ ID NO: 47733 - protein, 8 aa, Homo sapiens
SVKKQFEE

SEQ ID NO: 47734 - protein, 8 aa, Homo sapiens
VKKQFEEL

SEQ ID NO: 47735 - protein, 8 aa, Homo sapiens
KKQFEELT

SEQ ID NO: 47736 - protein, 8 aa, Homo sapiens
KQFEELTL

SEQ ID NO: 47737 - protein, 8 aa, Homo sapiens
QFEELTLG

SEQ ID NO: 47738 - protein, 8 aa, Homo sapiens
FEELTLGE

SEQ ID NO: 47739 - protein, 8 aa, Homo sapiens
EELTLGEF

SEQ ID NO: 47740 - protein, 8 aa, Homo sapiens
ELTLGEFL

SEQ ID NO: 47741 - protein, 8 aa, Homo sapiens
LTLGEFLK

SEQ ID NO: 47742 - protein, 8 aa, Homo sapiens
TLGEFLKL

SEQ ID NO: 47743 - protein, 8 aa, Homo sapiens
LGEFLKLD

SEQ ID NO: 47744 - protein, 8 aa, Homo sapiens
GEFLKLDR

SEQ ID NO: 47745 - protein, 8 aa, Homo sapiens
EFLKLDRE

SEQ ID NO: 47746 - protein, 8 aa, Homo sapiens
FLKLDRER

SEQ ID NO: 47747 - protein, 8 aa, Homo sapiens
LKLDRERA

SEQ ID NO: 47748 - protein, 8 aa, Homo sapiens
KLDRERAK

SEQ ID NO: 47749 - protein, 8 aa, Homo sapiens
LDRERAKN

SEQ ID NO: 47750 - protein, 8 aa, Homo sapiens
DRERAKNK

SEQ ID NO: 47751 - protein, 8 aa, Homo sapiens
RERAKNKI

SEQ ID NO: 47752 - protein, 8 aa, Homo sapiens
ERAKNKIA

SEQ ID NO: 47753 - protein, 8 aa, Homo sapiens
RAKNKIAK

SEQ ID NO: 47754 - protein, 8 aa, Homo sapiens
AKNKIAKE

SEQ ID NO: 47755 - protein, 8 aa, Homo sapiens
KNKIAKET

SEQ ID NO: 47756 - protein, 8 aa, Homo sapiens
NKIAKETN

SEQ ID NO: 47757 - protein, 8 aa, Homo sapiens
KIAKETNN

SEQ ID NO: 47758 - protein, 8 aa, Homo sapiens
IAKETNNK

SEQ ID NO: 47759 - protein, 8 aa, Homo sapiens
AKETNNKK

SEQ ID NO: 47760 - protein, 8 aa, Homo sapiens
KETNNKKK

SEQ ID NO: 47761 - protein, 8 aa, Homo sapiens
ETNNKKKE

SEQ ID NO: 47762 - protein, 8 aa, Homo sapiens
TNNKKKEF

SEQ ID NO: 47763 - protein, 8 aa, Homo sapiens
NNKKKEFE

SEQ ID NO: 47764 - protein, 8 aa, Homo sapiens
NKKKEFEE

SEQ ID NO: 47765 - protein, 8 aa, Homo sapiens
KKKEFEET

SEQ ID NO: 47766 - protein, 8 aa, Homo sapiens
KKEFEETA

SEQ ID NO: 47767 - protein, 8 aa, Homo sapiens
KEFEETAK

SEQ ID NO: 47768 - protein, 8 aa, Homo sapiens
EFEETAKK

SEQ ID NO: 47769 - protein, 8 aa, Homo sapiens
FEETAKKV

SEQ ID NO: 47770 - protein, 8 aa, Homo sapiens
EETAKKVR

SEQ ID NO: 47771 - protein, 8 aa, Homo sapiens
ETAKKVRR

SEQ ID NO: 47772 - protein, 8 aa, Homo sapiens
TAKKVRRA

SEQ ID NO: 47773 - protein, 8 aa, Homo sapiens
AKKVRRAI

SEQ ID NO: 47774 - protein, 8 aa, Homo sapiens
KKVRRAIE

SEQ ID NO: 47775 - protein, 8 aa, Homo sapiens
KVRRAIEQ

SEQ ID NO: 47776 - protein, 8 aa, Homo sapiens
VRRAIEQL

SEQ ID NO: 47777 - protein, 8 aa, Homo sapiens
RRAIEQLA

SEQ ID NO: 47778 - protein, 8 aa, Homo sapiens
RAIEQLAA

SEQ ID NO: 47779 - protein, 8 aa, Homo sapiens
AIEQLAAM

SEQ ID NO: 47780 - protein, 8 aa, Homo sapiens
IEQLAAMD

SEQ ID NO: 47781 - protein, 7 aa, Homo sapiens
EQLAAMD

SEQ ID NO: 47782 - protein, 9 aa, Homo sapiens
MGAPTLPPA

SEQ ID NO: 47783 - protein, 9 aa, Homo sapiens
GAPTLPPAW

SEQ ID NO: 47784 - protein, 9 aa, Homo sapiens
APTLPPAWQ

SEQ ID NO: 47785 - protein, 9 aa, Homo sapiens
PTLPPAWQP

SEQ ID NO: 47786 - protein, 9 aa, Homo sapiens
TLPPAWQPF

SEQ ID NO: 47787 - protein, 9 aa, Homo sapiens
LPPAWQPFL

SEQ ID NO: 47788 - protein, 9 aa, Homo sapiens
PPAWQPFLK

SEQ ID NO: 47789 - protein, 9 aa, Homo sapiens
PAWQPFLKD

SEQ ID NO: 47790 - protein, 9 aa, Homo sapiens
AWQPFLKDH

SEQ ID NO: 47791 - protein, 9 aa, Homo sapiens
WQPFLKDHR

SEQ ID NO: 47792 - protein, 9 aa, Homo sapiens
QPFLKDHRI

SEQ ID NO: 47793 - protein, 9 aa, Homo sapiens
PFLKDHRIS

SEQ ID NO: 47794 - protein, 9 aa, Homo sapiens
FLKDHRIST

SEQ ID NO: 47795 - protein, 9 aa, Homo sapiens
LKDHRISTF

SEQ ID NO: 47796 - protein, 9 aa, Homo sapiens
KDHRISTFK

SEQ ID NO: 47797 - protein, 9 aa, Homo sapiens
DHRISTFKN

SEQ ID NO: 47798 - protein, 9 aa, Homo sapiens
HRISTFKNW

SEQ ID NO: 47799 - protein, 9 aa, Homo sapiens
RISTFKNWP

SEQ ID NO: 47800 - protein, 9 aa, Homo sapiens
ISTFKNWPF

SEQ ID NO: 47801 - protein, 9 aa, Homo sapiens
STFKNWPFL

SEQ ID NO: 47802 - protein, 9 aa, Homo sapiens
TFKNWPFLE

SEQ ID NO: 47803 - protein, 9 aa, Homo sapiens
FKNWPFLEG

SEQ ID NO: 47804 - protein, 9 aa, Homo sapiens
KNWPFLEGC

SEQ ID NO: 47805 - protein, 9 aa, Homo sapiens
NWPFLEGCA

SEQ ID NO: 47806 - protein, 9 aa, Homo sapiens
WPFLEGCAC

SEQ ID NO: 47807 - protein, 9 aa, Homo sapiens
PFLEGCACT

SEQ ID NO: 47808 - protein, 9 aa, Homo sapiens
FLEGCACTP

SEQ ID NO: 47809 - protein, 9 aa, Homo sapiens
LEGCACTPE

SEQ ID NO: 47810 - protein, 9 aa, Homo sapiens
EGCACTPER

SEQ ID NO: 47811 - protein, 9 aa, Homo sapiens
GCACTPERM

SEQ ID NO: 47812 - protein, 9 aa, Homo sapiens
CACTPERMA

SEQ ID NO: 47813 - protein, 9 aa, Homo sapiens
ACTPERMAE

SEQ ID NO: 47814 - protein, 9 aa, Homo sapiens
CTPERMAEA

SEQ ID NO: 47815 - protein, 9 aa, Homo sapiens
TPERMAEAG

SEQ ID NO: 47816 - protein, 9 aa, Homo sapiens
PERMAEAGF

SEQ ID NO: 47817 - protein, 9 aa, Homo sapiens
ERMAEAGFI

SEQ ID NO: 47818 - protein, 9 aa, Homo sapiens
RMAEAGFIH

SEQ ID NO: 47819 - protein, 9 aa, Homo sapiens
MAEAGFIHC

SEQ ID NO: 47820 - protein, 9 aa, Homo sapiens
AEAGFIHCP

SEQ ID NO: 47821 - protein, 9 aa, Homo sapiens
EAGFIHCPT

SEQ ID NO: 47822 - protein, 9 aa, Homo sapiens
AGFIHCPTE

SEQ ID NO: 47823 - protein, 9 aa, Homo sapiens
GFIHCPTEN

SEQ ID NO: 47824 - protein, 9 aa, Homo sapiens
FIHCPTENE

SEQ ID NO: 47825 - protein, 9 aa, Homo sapiens
IHCPTENEP

SEQ ID NO: 47826 - protein, 9 aa, Homo sapiens
HCPTENEPD

SEQ ID NO: 47827 - protein, 9 aa, Homo sapiens
CPTENEPDL

SEQ ID NO: 47828 - protein, 9 aa, Homo sapiens
PTENEPDLA

SEQ ID NO: 47829 - protein, 9 aa, Homo sapiens
TENEPDLAQ

SEQ ID NO: 47830 - protein, 9 aa, Homo sapiens
ENEPDLAQC

SEQ ID NO: 47831 - protein, 9 aa, Homo sapiens
NEPDLAQCF

SEQ ID NO: 47832 - protein, 9 aa, Homo sapiens
EPDLAQCFF

SEQ ID NO: 47833 - protein, 9 aa, Homo sapiens
PDLAQCFFC

SEQ ID NO: 47834 - protein, 9 aa, Homo sapiens
DLAQCFFCF

SEQ ID NO: 47835 - protein, 9 aa, Homo sapiens
LAQCFFCFK

SEQ ID NO: 47836 - protein, 9 aa, Homo sapiens
AQCFFCFKE

SEQ ID NO: 47837 - protein, 9 aa, Homo sapiens
QCFFCFKEL

SEQ ID NO: 47838 - protein, 9 aa, Homo sapiens
CFFCFKELE

SEQ ID NO: 47839 - protein, 9 aa, Homo sapiens
FFCFKELEG

SEQ ID NO: 47840 - protein, 9 aa, Homo sapiens
FCFKELEGW

SEQ ID NO: 47841 - protein, 9 aa, Homo sapiens
CFKELEGWE

SEQ ID NO: 47842 - protein, 9 aa, Homo sapiens
FKELEGWEP

SEQ ID NO: 47843 - protein, 9 aa, Homo sapiens
KELEGWEPD

SEQ ID NO: 47844 - protein, 9 aa, Homo sapiens
ELEGWEPDD

SEQ ID NO: 47845 - protein, 9 aa, Homo sapiens
LEGWEPDDD

SEQ ID NO: 47846 - protein, 9 aa, Homo sapiens
EGWEPDDDP

SEQ ID NO: 47847 - protein, 9 aa, Homo sapiens
GWEPDDDPI

SEQ ID NO: 47848 - protein, 9 aa, Homo sapiens
WEPDDDPIE

SEQ ID NO: 47849 - protein, 9 aa, Homo sapiens
EPDDDPIEE

SEQ ID NO: 47850 - protein, 9 aa, Homo sapiens
PDDDPIEEH

SEQ ID NO: 47851 - protein, 9 aa, Homo sapiens
DDDPIEEHK

SEQ ID NO: 47852 - protein, 9 aa, Homo sapiens
DDPIEEHKK

SEQ ID NO: 47853 - protein, 9 aa, Homo sapiens
DPIEEHKKH

SEQ ID NO: 47854 - protein, 9 aa, Homo sapiens
PIEEHKKHS

SEQ ID NO: 47855 - protein, 9 aa, Homo sapiens
IEEHKKHSS

SEQ ID NO: 47856 - protein, 9 aa, Homo sapiens
EEHKKHSSG

SEQ ID NO: 47857 - protein, 9 aa, Homo sapiens
EHKKHSSGC

SEQ ID NO: 47858 - protein, 9 aa, Homo sapiens
HKKHSSGCA

SEQ ID NO: 47859 - protein, 9 aa, Homo sapiens
KKHSSGCAF

SEQ ID NO: 47860 - protein, 9 aa, Homo sapiens
KHSSGCAFL

SEQ ID NO: 47861 - protein, 9 aa, Homo sapiens
HSSGCAFLS

SEQ ID NO: 47862 - protein, 9 aa, Homo sapiens
SSGCAFLSV

SEQ ID NO: 47863 - protein, 9 aa, Homo sapiens
SGCAFLSVK

SEQ ID NO: 47864 - protein, 9 aa, Homo sapiens
GCAFLSVKK

SEQ ID NO: 47865 - protein, 9 aa, Homo sapiens
CAFLSVKKQ

SEQ ID NO: 47866 - protein, 9 aa, Homo sapiens
AFLSVKKQF

SEQ ID NO: 47867 - protein, 9 aa, Homo sapiens
FLSVKKQFE

SEQ ID NO: 47868 - protein, 9 aa, Homo sapiens
LSVKKQFEE

SEQ ID NO: 47869 - protein, 9 aa, Homo sapiens
SVKKQFEEL

SEQ ID NO: 47870 - protein, 9 aa, Homo sapiens
VKKQFEELT

SEQ ID NO: 47871 - protein, 9 aa, Homo sapiens
KKQFEELTL

SEQ ID NO: 47872 - protein, 9 aa, Homo sapiens
KQFEELTLG

SEQ ID NO: 47873 - protein, 9 aa, Homo sapiens
QFEELTLGE

SEQ ID NO: 47874 - protein, 9 aa, Homo sapiens
FEELTLGEF

SEQ ID NO: 47875 - protein, 9 aa, Homo sapiens
EELTLGEFL

SEQ ID NO: 47876 - protein, 9 aa, Homo sapiens
ELTLGEFLK

SEQ ID NO: 47877 - protein, 9 aa, Homo sapiens
LTLGEFLKL

SEQ ID NO: 47878 - protein, 9 aa, Homo sapiens
TLGEFLKLD

SEQ ID NO: 47879 - protein, 9 aa, Homo sapiens
LGEFLKLDR

SEQ ID NO: 47880 - protein, 9 aa, Homo sapiens
GEFLKLDRE

SEQ ID NO: 47881 - protein, 9 aa, Homo sapiens
EFLKLDRER

SEQ ID NO: 47882 - protein, 9 aa, Homo sapiens
FLKLDRERA

SEQ ID NO: 47883 - protein, 9 aa, Homo sapiens
LKLDRERAK

SEQ ID NO: 47884 - protein, 9 aa, Homo sapiens
KLDRERAKN

SEQ ID NO: 47885 - protein, 9 aa, Homo sapiens
LDRERAKNK

SEQ ID NO: 47886 - protein, 9 aa, Homo sapiens
DRERAKNKI

SEQ ID NO: 47887 - protein, 9 aa, Homo sapiens
RERAKNKIA

SEQ ID NO: 47888 - protein, 9 aa, Homo sapiens
ERAKNKIAK

SEQ ID NO: 47889 - protein, 9 aa, Homo sapiens
RAKNKIAKE

SEQ ID NO: 47890 - protein, 9 aa, Homo sapiens
AKNKIAKET

SEQ ID NO: 47891 - protein, 9 aa, Homo sapiens
KNKIAKETN

SEQ ID NO: 47892 - protein, 9 aa, Homo sapiens
NKIAKETNN

SEQ ID NO: 47893 - protein, 9 aa, Homo sapiens
KIAKETNNK

SEQ ID NO: 47894 - protein, 9 aa, Homo sapiens
IAKETNNKK

SEQ ID NO: 47895 - protein, 9 aa, Homo sapiens
AKETNNKKK

SEQ ID NO: 47896 - protein, 9 aa, Homo sapiens
KETNNKKKE

SEQ ID NO: 47897 - protein, 9 aa, Homo sapiens
ETNNKKKEF

SEQ ID NO: 47898 - protein, 9 aa, Homo sapiens
TNNKKKEFE

SEQ ID NO: 47899 - protein, 9 aa, Homo sapiens
NNKKKEFEE

SEQ ID NO: 47900 - protein, 9 aa, Homo sapiens
NKKKEFEET

SEQ ID NO: 47901 - protein, 9 aa, Homo sapiens
KKKEFEETA

SEQ ID NO: 47902 - protein, 9 aa, Homo sapiens
KKEFEETAK

SEQ ID NO: 47903 - protein, 9 aa, Homo sapiens
KEFEETAKK

SEQ ID NO: 47904 - protein, 9 aa, Homo sapiens
EFEETAKKV

SEQ ID NO: 47905 - protein, 9 aa, Homo sapiens
FEETAKKVR

SEQ ID NO: 47906 - protein, 9 aa, Homo sapiens
EETAKKVRR

SEQ ID NO: 47907 - protein, 9 aa, Homo sapiens
ETAKKVRRA

SEQ ID NO: 47908 - protein, 9 aa, Homo sapiens
TAKKVRRAI

SEQ ID NO: 47909 - protein, 9 aa, Homo sapiens
AKKVRRAIE

SEQ ID NO: 47910 - protein, 9 aa, Homo sapiens
KKVRRAIEQ

SEQ ID NO: 47911 - protein, 9 aa, Homo sapiens
KVRRAIEQL

SEQ ID NO: 47912 - protein, 9 aa, Homo sapiens
VRRAIEQLA

SEQ ID NO: 47913 - protein, 9 aa, Homo sapiens
RRAIEQLAA

SEQ ID NO: 47914 - protein, 9 aa, Homo sapiens
RAIEQLAAM

SEQ ID NO: 47915 - protein, 9 aa, Homo sapiens
AIEQLAAMD

SEQ ID NO: 47916 - protein, 10 aa, Homo sapiens
MGAPTLPPAW

SEQ ID NO: 47917 - protein, 10 aa, Homo sapiens
GAPTLPPAWQ

SEQ ID NO: 47918 - protein, 10 aa, Homo sapiens
APTLPPAWQP

SEQ ID NO: 47919 - protein, 10 aa, Homo sapiens
PTLPPAWQPF

SEQ ID NO: 47920 - protein, 10 aa, Homo sapiens
TLPPAWQPFL

SEQ ID NO: 47921 - protein, 10 aa, Homo sapiens
LPPAWQPFLK

SEQ ID NO: 47922 - protein, 10 aa, Homo sapiens
PPAWQPFLKD

SEQ ID NO: 47923 - protein, 10 aa, Homo sapiens
PAWQPFLKDH

SEQ ID NO: 47924 - protein, 10 aa, Homo sapiens
AWQPFLKDHR

SEQ ID NO: 47925 - protein, 10 aa, Homo sapiens
WQPFLKDHRI

SEQ ID NO: 47926 - protein, 10 aa, Homo sapiens
QPFLKDHRIS

SEQ ID NO: 47927 - protein, 10 aa, Homo sapiens
PFLKDHRIST

SEQ ID NO: 47928 - protein, 10 aa, Homo sapiens
FLKDHRISTF

SEQ ID NO: 47929 - protein, 10 aa, Homo sapiens
LKDHRISTFK

SEQ ID NO: 47930 - protein, 10 aa, Homo sapiens
KDHRISTFKN

SEQ ID NO: 47931 - protein, 10 aa, Homo sapiens
DHRISTFKNW

SEQ ID NO: 47932 - protein, 10 aa, Homo sapiens
HRISTFKNWP

SEQ ID NO: 47933 - protein, 10 aa, Homo sapiens
RISTFKNWPF

SEQ ID NO: 47934 - protein, 10 aa, Homo sapiens
ISTFKNWPFL

SEQ ID NO: 47935 - protein, 10 aa, Homo sapiens
STFKNWPFLE

SEQ ID NO: 47936 - protein, 10 aa, Homo sapiens
TFKNWPFLEG

SEQ ID NO: 47937 - protein, 10 aa, Homo sapiens
FKNWPFLEGC

SEQ ID NO: 47938 - protein, 10 aa, Homo sapiens
KNWPFLEGCA

SEQ ID NO: 47939 - protein, 10 aa, Homo sapiens
NWPFLEGCAC

SEQ ID NO: 47940 - protein, 10 aa, Homo sapiens
WPFLEGCACT

SEQ ID NO: 47941 - protein, 10 aa, Homo sapiens
PFLEGCACTP

SEQ ID NO: 47942 - protein, 10 aa, Homo sapiens
FLEGCACTPE

SEQ ID NO: 47943 - protein, 10 aa, Homo sapiens
LEGCACTPER

SEQ ID NO: 47944 - protein, 10 aa, Homo sapiens
EGCACTPERM

SEQ ID NO: 47945 - protein, 10 aa, Homo sapiens
GCACTPERMA

SEQ ID NO: 47946 - protein, 10 aa, Homo sapiens
CACTPERMAE

SEQ ID NO: 47947 - protein, 10 aa, Homo sapiens
ACTPERMAEA

SEQ ID NO: 47948 - protein, 10 aa, Homo sapiens
CTPERMAEAG

SEQ ID NO: 47949 - protein, 10 aa, Homo sapiens
TPERMAEAGF

SEQ ID NO: 47950 - protein, 10 aa, Homo sapiens
PERMAEAGFI

SEQ ID NO: 47951 - protein, 10 aa, Homo sapiens
ERMAEAGFIH

SEQ ID NO: 47952 - protein, 10 aa, Homo sapiens
RMAEAGFIHC

SEQ ID NO: 47953 - protein, 10 aa, Homo sapiens
MAEAGFIHCP

SEQ ID NO: 47954 - protein, 10 aa, Homo sapiens
AEAGFIHCPT

SEQ ID NO: 47955 - protein, 10 aa, Homo sapiens
EAGFIHCPTE

SEQ ID NO: 47956 - protein, 10 aa, Homo sapiens
AGFIHCPTEN

SEQ ID NO: 47957 - protein, 10 aa, Homo sapiens
GFIHCPTENE

SEQ ID NO: 47958 - protein, 10 aa, Homo sapiens
FIHCPTENEP

SEQ ID NO: 47959 - protein, 10 aa, Homo sapiens
IHCPTENEPD

SEQ ID NO: 47960 - protein, 10 aa, Homo sapiens
HCPTENEPDL

SEQ ID NO: 47961 - protein, 10 aa, Homo sapiens
CPTENEPDLA

SEQ ID NO: 47962 - protein, 10 aa, Homo sapiens
PTENEPDLAQ

SEQ ID NO: 47963 - protein, 10 aa, Homo sapiens
TENEPDLAQC

SEQ ID NO: 47964 - protein, 10 aa, Homo sapiens
ENEPDLAQCF

SEQ ID NO: 47965 - protein, 10 aa, Homo sapiens
NEPDLAQCFF

SEQ ID NO: 47966 - protein, 10 aa, Homo sapiens
EPDLAQCFFC

SEQ ID NO: 47967 - protein, 10 aa, Homo sapiens
PDLAQCFFCF

SEQ ID NO: 47968 - protein, 10 aa, Homo sapiens
DLAQCFFCFK

SEQ ID NO: 47969 - protein, 10 aa, Homo sapiens
LAQCFFCFKE

SEQ ID NO: 47970 - protein, 10 aa, Homo sapiens
AQCFFCFKEL

SEQ ID NO: 47971 - protein, 10 aa, Homo sapiens
QCFFCFKELE

SEQ ID NO: 47972 - protein, 10 aa, Homo sapiens
CFFCFKELEG

SEQ ID NO: 47973 - protein, 10 aa, Homo sapiens
FFCFKELEGW

SEQ ID NO: 47974 - protein, 10 aa, Homo sapiens
FCFKELEGWE

SEQ ID NO: 47975 - protein, 10 aa, Homo sapiens
CFKELEGWEP

SEQ ID NO: 47976 - protein, 10 aa, Homo sapiens
FKELEGWEPD

SEQ ID NO: 47977 - protein, 10 aa, Homo sapiens
KELEGWEPDD

SEQ ID NO: 47978 - protein, 10 aa, Homo sapiens
ELEGWEPDDD

SEQ ID NO: 47979 - protein, 10 aa, Homo sapiens
LEGWEPDDDP

SEQ ID NO: 47980 - protein, 10 aa, Homo sapiens
EGWEPDDDPI

SEQ ID NO: 47981 - protein, 10 aa, Homo sapiens
GWEPDDDPIE

SEQ ID NO: 47982 - protein, 10 aa, Homo sapiens
WEPDDDPIEE

SEQ ID NO: 47983 - protein, 10 aa, Homo sapiens
EPDDDPIEEH

SEQ ID NO: 47984 - protein, 10 aa, Homo sapiens
PDDDPIEEHK

SEQ ID NO: 47985 - protein, 10 aa, Homo sapiens
DDDPIEEHKK

SEQ ID NO: 47986 - protein, 10 aa, Homo sapiens
DDPIEEHKKH

SEQ ID NO: 47987 - protein, 10 aa, Homo sapiens
DPIEEHKKHS

SEQ ID NO: 47988 - protein, 10 aa, Homo sapiens
PIEEHKKHSS

SEQ ID NO: 47989 - protein, 10 aa, Homo sapiens
IEEHKKHSSG

SEQ ID NO: 47990 - protein, 10 aa, Homo sapiens
EEHKKHSSGC

SEQ ID NO: 47991 - protein, 10 aa, Homo sapiens
EHKKHSSGCA

SEQ ID NO: 47992 - protein, 10 aa, Homo sapiens
HKKHSSGCAF

SEQ ID NO: 47993 - protein, 10 aa, Homo sapiens
KKHSSGCAFL

SEQ ID NO: 47994 - protein, 10 aa, Homo sapiens
KHSSGCAFLS

SEQ ID NO: 47995 - protein, 10 aa, Homo sapiens
HSSGCAFLSV

SEQ ID NO: 47996 - protein, 10 aa, Homo sapiens
SSGCAFLSVK

SEQ ID NO: 47997 - protein, 10 aa, Homo sapiens
SGCAFLSVKK

SEQ ID NO: 47998 - protein, 10 aa, Homo sapiens
GCAFLSVKKQ

SEQ ID NO: 47999 - protein, 10 aa, Homo sapiens
CAFLSVKKQF

SEQ ID NO: 48000 - protein, 10 aa, Homo sapiens
AFLSVKKQFE

SEQ ID NO: 48001 - protein, 10 aa, Homo sapiens
FLSVKKQFEE

SEQ ID NO: 48002 - protein, 10 aa, Homo sapiens
LSVKKQFEEL

SEQ ID NO: 48003 - protein, 10 aa, Homo sapiens
SVKKQFEELT

SEQ ID NO: 48004 - protein, 10 aa, Homo sapiens
VKKQFEELTL

SEQ ID NO: 48005 - protein, 10 aa, Homo sapiens
KKQFEELTLG

SEQ ID NO: 48006 - protein, 10 aa, Homo sapiens
KQFEELTLGE

SEQ ID NO: 48007 - protein, 10 aa, Homo sapiens
QFEELTLGEF

SEQ ID NO: 48008 - protein, 10 aa, Homo sapiens
FEELTLGEFL

SEQ ID NO: 48009 - protein, 10 aa, Homo sapiens
EELTLGEFLK

SEQ ID NO: 48010 - protein, 10 aa, Homo sapiens
ELTLGEFLKL

SEQ ID NO: 48011 - protein, 10 aa, Homo sapiens
LTLGEFLKLD

SEQ ID NO: 48012 - protein, 10 aa, Homo sapiens
TLGEFLKLDR

SEQ ID NO: 48013 - protein, 10 aa, Homo sapiens
LGEFLKLDRE

SEQ ID NO: 48014 - protein, 10 aa, Homo sapiens
GEFLKLDRER

SEQ ID NO: 48015 - protein, 10 aa, Homo sapiens
EFLKLDRERA

SEQ ID NO: 48016 - protein, 10 aa, Homo sapiens
FLKLDRERAK

SEQ ID NO: 48017 - protein, 10 aa, Homo sapiens
LKLDRERAKN

SEQ ID NO: 48018 - protein, 10 aa, Homo sapiens
KLDRERAKNK

SEQ ID NO: 48019 - protein, 10 aa, Homo sapiens
LDRERAKNKI

SEQ ID NO: 48020 - protein, 10 aa, Homo sapiens
DRERAKNKIA

SEQ ID NO: 48021 - protein, 10 aa, Homo sapiens
RERAKNKIAK

SEQ ID NO: 48022 - protein, 10 aa, Homo sapiens
ERAKNKIAKE

SEQ ID NO: 48023 - protein, 10 aa, Homo sapiens
RAKNKIAKET

SEQ ID NO: 48024 - protein, 10 aa, Homo sapiens
AKNKIAKETN

SEQ ID NO: 48025 - protein, 10 aa, Homo sapiens
KNKIAKETNN

SEQ ID NO: 48026 - protein, 10 aa, Homo sapiens
NKIAKETNNK

SEQ ID NO: 48027 - protein, 10 aa, Homo sapiens
KIAKETNNKK

SEQ ID NO: 48028 - protein, 10 aa, Homo sapiens
IAKETNNKKK

SEQ ID NO: 48029 - protein, 10 aa, Homo sapiens
AKETNNKKKE

SEQ ID NO: 48030 - protein, 10 aa, Homo sapiens
KETNNKKKEF

SEQ ID NO: 48031 - protein, 10 aa, Homo sapiens
ETNNKKKEFE

SEQ ID NO: 48032 - protein, 10 aa, Homo sapiens
TNNKKKEFEE

SEQ ID NO: 48033 - protein, 10 aa, Homo sapiens
NNKKKEFEET

SEQ ID NO: 48034 - protein, 10 aa, Homo sapiens
NKKKEFEETA

SEQ ID NO: 48035 - protein, 10 aa, Homo sapiens
KKKEFEETAK

SEQ ID NO: 48036 - protein, 10 aa, Homo sapiens
KKEFEETAKK

SEQ ID NO: 48037 - protein, 10 aa, Homo sapiens
KEFEETAKKV

SEQ ID NO: 48038 - protein, 10 aa, Homo sapiens
EFEETAKKVR

SEQ ID NO: 48039 - protein, 10 aa, Homo sapiens
FEETAKKVRR

SEQ ID NO: 48040 - protein, 10 aa, Homo sapiens
EETAKKVRRA

SEQ ID NO: 48041 - protein, 10 aa, Homo sapiens
ETAKKVRRAI

SEQ ID NO: 48042 - protein, 10 aa, Homo sapiens
TAKKVRRAIE

SEQ ID NO: 48043 - protein, 10 aa, Homo sapiens
AKKVRRAIEQ

SEQ ID NO: 48044 - protein, 10 aa, Homo sapiens
KKVRRAIEQL

SEQ ID NO: 48045 - protein, 10 aa, Homo sapiens
KVRRAIEQLA

SEQ ID NO: 48046 - protein, 10 aa, Homo sapiens
VRRAIEQLAA

SEQ ID NO: 48047 - protein, 10 aa, Homo sapiens
RRAIEQLAAM

SEQ ID NO: 48048 - protein, 10 aa, Homo sapiens
RAIEQLAAMD

SEQ ID NO: 48049 - protein, 11 aa, Homo sapiens
MGAPTLPPAWQ

SEQ ID NO: 48050 - protein, 11 aa, Homo sapiens
GAPTLPPAWQP

SEQ ID NO: 48051 - protein, 11 aa, Homo sapiens
APTLPPAWQPF

SEQ ID NO: 48052 - protein, 11 aa, Homo sapiens
PTLPPAWQPFL

SEQ ID NO: 48053 - protein, 11 aa, Homo sapiens
TLPPAWQPFLK

SEQ ID NO: 48054 - protein, 11 aa, Homo sapiens
LPPAWQPFLKD

SEQ ID NO: 48055 - protein, 11 aa, Homo sapiens
PPAWQPFLKDH

SEQ ID NO: 48056 - protein, 11 aa, Homo sapiens
PAWQPFLKDHR

SEQ ID NO: 48057 - protein, 11 aa, Homo sapiens
AWQPFLKDHRI

SEQ ID NO: 48058 - protein, 11 aa, Homo sapiens
WQPFLKDHRIS

SEQ ID NO: 48059 - protein, 11 aa, Homo sapiens
QPFLKDHRIST

SEQ ID NO: 48060 - protein, 11 aa, Homo sapiens
PFLKDHRISTF

SEQ ID NO: 48061 - protein, 11 aa, Homo sapiens
FLKDHRISTFK

SEQ ID NO: 48062 - protein, 11 aa, Homo sapiens
LKDHRISTFKN

SEQ ID NO: 48063 - protein, 11 aa, Homo sapiens
KDHRISTFKNW

SEQ ID NO: 48064 - protein, 11 aa, Homo sapiens
DHRISTFKNWP

SEQ ID NO: 48065 - protein, 11 aa, Homo sapiens
HRISTFKNWPF

SEQ ID NO: 48066 - protein, 11 aa, Homo sapiens
RISTFKNWPFL

SEQ ID NO: 48067 - protein, 11 aa, Homo sapiens
ISTFKNWPFLE

SEQ ID NO: 48068 - protein, 11 aa, Homo sapiens
STFKNWPFLEG

SEQ ID NO: 48069 - protein, 11 aa, Homo sapiens
TFKNWPFLEGC

SEQ ID NO: 48070 - protein, 11 aa, Homo sapiens
FKNWPFLEGCA

SEQ ID NO: 48071 - protein, 11 aa, Homo sapiens
KNWPFLEGCAC

SEQ ID NO: 48072 - protein, 11 aa, Homo sapiens
NWPFLEGCACT

SEQ ID NO: 48073 - protein, 11 aa, Homo sapiens
WPFLEGCACTP

SEQ ID NO: 48074 - protein, 11 aa, Homo sapiens
PFLEGCACTPE

SEQ ID NO: 48075 - protein, 11 aa, Homo sapiens
FLEGCACTPER

SEQ ID NO: 48076 - protein, 11 aa, Homo sapiens
LEGCACTPERM

SEQ ID NO: 48077 - protein, 11 aa, Homo sapiens
EGCACTPERMA

SEQ ID NO: 48078 - protein, 11 aa, Homo sapiens
GCACTPERMAE

SEQ ID NO: 48079 - protein, 11 aa, Homo sapiens
CACTPERMAEA

SEQ ID NO: 48080 - protein, 11 aa, Homo sapiens
ACTPERMAEAG

SEQ ID NO: 48081 - protein, 11 aa, Homo sapiens
CTPERMAEAGF

SEQ ID NO: 48082 - protein, 11 aa, Homo sapiens
TPERMAEAGFI

SEQ ID NO: 48083 - protein, 11 aa, Homo sapiens
PERMAEAGFIH

SEQ ID NO: 48084 - protein, 11 aa, Homo sapiens
ERMAEAGFIHC

SEQ ID NO: 48085 - protein, 11 aa, Homo sapiens
RMAEAGFIHCP

SEQ ID NO: 48086 - protein, 11 aa, Homo sapiens
MAEAGFIHCPT

SEQ ID NO: 48087 - protein, 11 aa, Homo sapiens
AEAGFIHCPTE

SEQ ID NO: 48088 - protein, 11 aa, Homo sapiens
EAGFIHCPTEN

SEQ ID NO: 48089 - protein, 11 aa, Homo sapiens
AGFIHCPTENE

SEQ ID NO: 48090 - protein, 11 aa, Homo sapiens
GFIHCPTENEP

SEQ ID NO: 48091 - protein, 11 aa, Homo sapiens
FIHCPTENEPD

SEQ ID NO: 48092 - protein, 11 aa, Homo sapiens
IHCPTENEPDL

SEQ ID NO: 48093 - protein, 11 aa, Homo sapiens
HCPTENEPDLA

SEQ ID NO: 48094 - protein, 11 aa, Homo sapiens
CPTENEPDLAQ

SEQ ID NO: 48095 - protein, 11 aa, Homo sapiens
PTENEPDLAQC

SEQ ID NO: 48096 - protein, 11 aa, Homo sapiens
TENEPDLAQCF

SEQ ID NO: 48097 - protein, 11 aa, Homo sapiens
ENEPDLAQCFF

SEQ ID NO: 48098 - protein, 11 aa, Homo sapiens
NEPDLAQCFFC

SEQ ID NO: 48099 - protein, 11 aa, Homo sapiens
EPDLAQCFFCF

SEQ ID NO: 48100 - protein, 11 aa, Homo sapiens
PDLAQCFFCFK

SEQ ID NO: 48101 - protein, 11 aa, Homo sapiens
DLAQCFFCFKE

SEQ ID NO: 48102 - protein, 11 aa, Homo sapiens
LAQCFFCFKEL

SEQ ID NO: 48103 - protein, 11 aa, Homo sapiens
AQCFFCFKELE

SEQ ID NO: 48104 - protein, 11 aa, Homo sapiens
QCFFCFKELEG

SEQ ID NO: 48105 - protein, 11 aa, Homo sapiens
CFFCFKELEGW

SEQ ID NO: 48106 - protein, 11 aa, Homo sapiens
FFCFKELEGWE

SEQ ID NO: 48107 - protein, 11 aa, Homo sapiens
FCFKELEGWEP

SEQ ID NO: 48108 - protein, 11 aa, Homo sapiens
CFKELEGWEPD

SEQ ID NO: 48109 - protein, 11 aa, Homo sapiens
FKELEGWEPDD

SEQ ID NO: 48110 - protein, 11 aa, Homo sapiens
KELEGWEPDDD

SEQ ID NO: 48111 - protein, 11 aa, Homo sapiens
ELEGWEPDDDP

SEQ ID NO: 48112 - protein, 11 aa, Homo sapiens
LEGWEPDDDPI

SEQ ID NO: 48113 - protein, 11 aa, Homo sapiens
EGWEPDDDPIE

SEQ ID NO: 48114 - protein, 11 aa, Homo sapiens
GWEPDDDPIEE

SEQ ID NO: 48115 - protein, 11 aa, Homo sapiens
WEPDDDPIEEH

SEQ ID NO: 48116 - protein, 11 aa, Homo sapiens
EPDDDPIEEHK

SEQ ID NO: 48117 - protein, 11 aa, Homo sapiens
PDDDPIEEHKK

SEQ ID NO: 48118 - protein, 11 aa, Homo sapiens
DDDPIEEHKKH

SEQ ID NO: 48119 - protein, 11 aa, Homo sapiens
DDPIEEHKKHS

SEQ ID NO: 48120 - protein, 11 aa, Homo sapiens
DPIEEHKKHSS

SEQ ID NO: 48121 - protein, 11 aa, Homo sapiens
PIEEHKKHSSG

SEQ ID NO: 48122 - protein, 11 aa, Homo sapiens
IEEHKKHSSGC

SEQ ID NO: 48123 - protein, 11 aa, Homo sapiens
EEHKKHSSGCA

SEQ ID NO: 48124 - protein, 11 aa, Homo sapiens
EHKKHSSGCAF

SEQ ID NO: 48125 - protein, 11 aa, Homo sapiens
HKKHSSGCAFL

SEQ ID NO: 48126 - protein, 11 aa, Homo sapiens
KKHSSGCAFLS

SEQ ID NO: 48127 - protein, 11 aa, Homo sapiens
KHSSGCAFLSV

SEQ ID NO: 48128 - protein, 11 aa, Homo sapiens
HSSGCAFLSVK

SEQ ID NO: 48129 - protein, 11 aa, Homo sapiens
SSGCAFLSVKK

SEQ ID NO: 48130 - protein, 11 aa, Homo sapiens
SGCAFLSVKKQ

SEQ ID NO: 48131 - protein, 11 aa, Homo sapiens
GCAFLSVKKQF

SEQ ID NO: 48132 - protein, 11 aa, Homo sapiens
CAFLSVKKQFE

SEQ ID NO: 48133 - protein, 11 aa, Homo sapiens
AFLSVKKQFEE

SEQ ID NO: 48134 - protein, 11 aa, Homo sapiens
FLSVKKQFEEL

SEQ ID NO: 48135 - protein, 11 aa, Homo sapiens
LSVKKQFEELT

SEQ ID NO: 48136 - protein, 11 aa, Homo sapiens
SVKKQFEELTL

SEQ ID NO: 48137 - protein, 11 aa, Homo sapiens
VKKQFEELTLG

SEQ ID NO: 48138 - protein, 11 aa, Homo sapiens
KKQFEELTLGE

SEQ ID NO: 48139 - protein, 11 aa, Homo sapiens
KQFEELTLGEF

SEQ ID NO: 48140 - protein, 11 aa, Homo sapiens
QFEELTLGEFL

SEQ ID NO: 48141 - protein, 11 aa, Homo sapiens
FEELTLGEFLK

SEQ ID NO: 48142 - protein, 11 aa, Homo sapiens
EELTLGEFLKL

SEQ ID NO: 48143 - protein, 11 aa, Homo sapiens
ELTLGEFLKLD

SEQ ID NO: 48144 - protein, 11 aa, Homo sapiens
LTLGEFLKLDR

SEQ ID NO: 48145 - protein, 11 aa, Homo sapiens
TLGEFLKLDRE

SEQ ID NO: 48146 - protein, 11 aa, Homo sapiens
LGEFLKLDRER

SEQ ID NO: 48147 - protein, 11 aa, Homo sapiens
GEFLKLDRERA

SEQ ID NO: 48148 - protein, 11 aa, Homo sapiens
EFLKLDRERAK

SEQ ID NO: 48149 - protein, 11 aa, Homo sapiens
FLKLDRERAKN

SEQ ID NO: 48150 - protein, 11 aa, Homo sapiens
LKLDRERAKNK

SEQ ID NO: 48151 - protein, 11 aa, Homo sapiens
KLDRERAKNKI

SEQ ID NO: 48152 - protein, 11 aa, Homo sapiens
LDRERAKNKIA

SEQ ID NO: 48153 - protein, 11 aa, Homo sapiens
DRERAKNKIAK

SEQ ID NO: 48154 - protein, 11 aa, Homo sapiens
RERAKNKIAKE

SEQ ID NO: 48155 - protein, 11 aa, Homo sapiens
ERAKNKIAKET

SEQ ID NO: 48156 - protein, 11 aa, Homo sapiens
RAKNKIAKETN

SEQ ID NO: 48157 - protein, 11 aa, Homo sapiens
AKNKIAKETNN

SEQ ID NO: 48158 - protein, 11 aa, Homo sapiens
KNKIAKETNNK

SEQ ID NO: 48159 - protein, 11 aa, Homo sapiens
NKIAKETNNKK

SEQ ID NO: 48160 - protein, 11 aa, Homo sapiens
KIAKETNNKKK

SEQ ID NO: 48161 - protein, 11 aa, Homo sapiens
IAKETNNKKKE

SEQ ID NO: 48162 - protein, 11 aa, Homo sapiens
AKETNNKKKEF

SEQ ID NO: 48163 - protein, 11 aa, Homo sapiens
KETNNKKKEFE

SEQ ID NO: 48164 - protein, 11 aa, Homo sapiens
ETNNKKKEFEE

SEQ ID NO: 48165 - protein, 11 aa, Homo sapiens
TNNKKKEFEET

SEQ ID NO: 48166 - protein, 11 aa, Homo sapiens
NNKKKEFEETA

SEQ ID NO: 48167 - protein, 11 aa, Homo sapiens
NKKKEFEETAK

SEQ ID NO: 48168 - protein, 11 aa, Homo sapiens
KKKEFEETAKK

SEQ ID NO: 48169 - protein, 11 aa, Homo sapiens
KKEFEETAKKV

SEQ ID NO: 48170 - protein, 11 aa, Homo sapiens
KEFEETAKKVR

SEQ ID NO: 48171 - protein, 11 aa, Homo sapiens
EFEETAKKVRR

SEQ ID NO: 48172 - protein, 11 aa, Homo sapiens
FEETAKKVRRA

SEQ ID NO: 48173 - protein, 11 aa, Homo sapiens
EETAKKVRRAI

SEQ ID NO: 48174 - protein, 11 aa, Homo sapiens
ETAKKVRRAIE

SEQ ID NO: 48175 - protein, 11 aa, Homo sapiens
TAKKVRRAIEQ

SEQ ID NO: 48176 - protein, 11 aa, Homo sapiens
AKKVRRAIEQL

SEQ ID NO: 48177 - protein, 11 aa, Homo sapiens
KKVRRAIEQLA

SEQ ID NO: 48178 - protein, 11 aa, Homo sapiens
KVRRAIEQLAA

SEQ ID NO: 48179 - protein, 11 aa, Homo sapiens
VRRAIEQLAAM

SEQ ID NO: 48180 - protein, 11 aa, Homo sapiens
RRAIEQLAAMD

SEQ ID NO: 48181 - protein, 13 aa, Homo sapiens
MFGLKRNAVIGLN

SEQ ID NO: 48182 - protein, 13 aa, Homo sapiens
FGLKRNAVIGLNL

SEQ ID NO: 48183 - protein, 13 aa, Homo sapiens
GLKRNAVIGLNLY

SEQ ID NO: 48184 - protein, 13 aa, Homo sapiens
LKRNAVIGLNLYC

SEQ ID NO: 48185 - protein, 13 aa, Homo sapiens
KRNAVIGLNLYCG

SEQ ID NO: 48186 - protein, 13 aa, Homo sapiens
RNAVIGLNLYCGG

SEQ ID NO: 48187 - protein, 13 aa, Homo sapiens
NAVIGLNLYCGGA

SEQ ID NO: 48188 - protein, 13 aa, Homo sapiens
AVIGLNLYCGGAG

SEQ ID NO: 48189 - protein, 13 aa, Homo sapiens
VIGLNLYCGGAGL

SEQ ID NO: 48190 - protein, 13 aa, Homo sapiens
IGLNLYCGGAGLG

SEQ ID NO: 48191 - protein, 13 aa, Homo sapiens
GLNLYCGGAGLGA

SEQ ID NO: 48192 - protein, 13 aa, Homo sapiens
LNLYCGGAGLGAG

SEQ ID NO: 48193 - protein, 13 aa, Homo sapiens
NLYCGGAGLGAGS

SEQ ID NO: 48194 - protein, 13 aa, Homo sapiens
LYCGGAGLGAGSG

SEQ ID NO: 48195 - protein, 13 aa, Homo sapiens
YCGGAGLGAGSGG

SEQ ID NO: 48196 - protein, 13 aa, Homo sapiens
CGGAGLGAGSGGA

SEQ ID NO: 48197 - protein, 13 aa, Homo sapiens
GGAGLGAGSGGAT

SEQ ID NO: 48198 - protein, 13 aa, Homo sapiens
GAGLGAGSGGATR

SEQ ID NO: 48199 - protein, 13 aa, Homo sapiens
AGLGAGSGGATRP

SEQ ID NO: 48200 - protein, 13 aa, Homo sapiens
GLGAGSGGATRPG

SEQ ID NO: 48201 - protein, 13 aa, Homo sapiens
LGAGSGGATRPGG

SEQ ID NO: 48202 - protein, 13 aa, Homo sapiens
GAGSGGATRPGGR

SEQ ID NO: 48203 - protein, 13 aa, Homo sapiens
AGSGGATRPGGRL

SEQ ID NO: 48204 - protein, 13 aa, Homo sapiens
GSGGATRPGGRLL

SEQ ID NO: 48205 - protein, 13 aa, Homo sapiens
SGGATRPGGRLLA

SEQ ID NO: 48206 - protein, 13 aa, Homo sapiens
GGATRPGGRLLAT

SEQ ID NO: 48207 - protein, 13 aa, Homo sapiens
GATRPGGRLLATE

SEQ ID NO: 48208 - protein, 13 aa, Homo sapiens
ATRPGGRLLATEK

SEQ ID NO: 48209 - protein, 13 aa, Homo sapiens
TRPGGRLLATEKE

SEQ ID NO: 48210 - protein, 13 aa, Homo sapiens
RPGGRLLATEKEA

SEQ ID NO: 48211 - protein, 13 aa, Homo sapiens
PGGRLLATEKEAS

SEQ ID NO: 48212 - protein, 13 aa, Homo sapiens
GGRLLATEKEASA

SEQ ID NO: 48213 - protein, 13 aa, Homo sapiens
GRLLATEKEASAR

SEQ ID NO: 48214 - protein, 13 aa, Homo sapiens
RLLATEKEASARR

SEQ ID NO: 48215 - protein, 13 aa, Homo sapiens
LLATEKEASARRE

SEQ ID NO: 48216 - protein, 13 aa, Homo sapiens
LATEKEASARREI

SEQ ID NO: 48217 - protein, 13 aa, Homo sapiens
ATEKEASARREIG

SEQ ID NO: 48218 - protein, 13 aa, Homo sapiens
TEKEASARREIGG

SEQ ID NO: 48219 - protein, 13 aa, Homo sapiens
EKEASARREIGGG

SEQ ID NO: 48220 - protein, 13 aa, Homo sapiens
KEASARREIGGGE

SEQ ID NO: 48221 - protein, 13 aa, Homo sapiens
EASARREIGGGEA

SEQ ID NO: 48222 - protein, 13 aa, Homo sapiens
ASARREIGGGEAG

SEQ ID NO: 48223 - protein, 13 aa, Homo sapiens
SARREIGGGEAGA

SEQ ID NO: 48224 - protein, 13 aa, Homo sapiens
ARREIGGGEAGAV

SEQ ID NO: 48225 - protein, 13 aa, Homo sapiens
RREIGGGEAGAVI

SEQ ID NO: 48226 - protein, 13 aa, Homo sapiens
REIGGGEAGAVIG

SEQ ID NO: 48227 - protein, 13 aa, Homo sapiens
EIGGGEAGAVIGG

SEQ ID NO: 48228 - protein, 13 aa, Homo sapiens
IGGGEAGAVIGGS

SEQ ID NO: 48229 - protein, 13 aa, Homo sapiens
GGGEAGAVIGGSA

SEQ ID NO: 48230 - protein, 13 aa, Homo sapiens
GGEAGAVIGGSAG

SEQ ID NO: 48231 - protein, 13 aa, Homo sapiens
GEAGAVIGGSAGA

SEQ ID NO: 48232 - protein, 13 aa, Homo sapiens
EAGAVIGGSAGAS

SEQ ID NO: 48233 - protein, 13 aa, Homo sapiens
AGAVIGGSAGASP

SEQ ID NO: 48234 - protein, 13 aa, Homo sapiens
GAVIGGSAGASPP

SEQ ID NO: 48235 - protein, 13 aa, Homo sapiens
AVIGGSAGASPPS

SEQ ID NO: 48236 - protein, 13 aa, Homo sapiens
VIGGSAGASPPST

SEQ ID NO: 48237 - protein, 13 aa, Homo sapiens
IGGSAGASPPSTL

SEQ ID NO: 48238 - protein, 13 aa, Homo sapiens
GGSAGASPPSTLT

SEQ ID NO: 48239 - protein, 13 aa, Homo sapiens
GSAGASPPSTLTP

SEQ ID NO: 48240 - protein, 13 aa, Homo sapiens
SAGASPPSTLTPD

SEQ ID NO: 48241 - protein, 13 aa, Homo sapiens
AGASPPSTLTPDS

SEQ ID NO: 48242 - protein, 13 aa, Homo sapiens
GASPPSTLTPDSR

SEQ ID NO: 48243 - protein, 13 aa, Homo sapiens
ASPPSTLTPDSRR

SEQ ID NO: 48244 - protein, 13 aa, Homo sapiens
SPPSTLTPDSRRV

SEQ ID NO: 48245 - protein, 13 aa, Homo sapiens
PPSTLTPDSRRVA

SEQ ID NO: 48246 - protein, 13 aa, Homo sapiens
PSTLTPDSRRVAR

SEQ ID NO: 48247 - protein, 13 aa, Homo sapiens
STLTPDSRRVARP

SEQ ID NO: 48248 - protein, 13 aa, Homo sapiens
TLTPDSRRVARPP

SEQ ID NO: 48249 - protein, 13 aa, Homo sapiens
LTPDSRRVARPPP

SEQ ID NO: 48250 - protein, 13 aa, Homo sapiens
TPDSRRVARPPPI

SEQ ID NO: 48251 - protein, 13 aa, Homo sapiens
PDSRRVARPPPIG

SEQ ID NO: 48252 - protein, 13 aa, Homo sapiens
DSRRVARPPPIGA

SEQ ID NO: 48253 - protein, 13 aa, Homo sapiens
SRRVARPPPIGAE

SEQ ID NO: 48254 - protein, 13 aa, Homo sapiens
RRVARPPPIGAEV

SEQ ID NO: 48255 - protein, 13 aa, Homo sapiens
RVARPPPIGAEVP

SEQ ID NO: 48256 - protein, 13 aa, Homo sapiens
VARPPPIGAEVPD

SEQ ID NO: 48257 - protein, 13 aa, Homo sapiens
ARPPPIGAEVPDV

SEQ ID NO: 48258 - protein, 13 aa, Homo sapiens
RPPPIGAEVPDVT

SEQ ID NO: 48259 - protein, 13 aa, Homo sapiens
PPPIGAEVPDVTA

SEQ ID NO: 48260 - protein, 13 aa, Homo sapiens
PPIGAEVPDVTAT

SEQ ID NO: 48261 - protein, 13 aa, Homo sapiens
PIGAEVPDVTATP

SEQ ID NO: 48262 - protein, 13 aa, Homo sapiens
IGAEVPDVTATPA

SEQ ID NO: 48263 - protein, 13 aa, Homo sapiens
GAEVPDVTATPAR

SEQ ID NO: 48264 - protein, 13 aa, Homo sapiens
AEVPDVTATPARL

SEQ ID NO: 48265 - protein, 13 aa, Homo sapiens
EVPDVTATPARLL

SEQ ID NO: 48266 - protein, 13 aa, Homo sapiens
VPDVTATPARLLF

SEQ ID NO: 48267 - protein, 13 aa, Homo sapiens
PDVTATPARLLFF

SEQ ID NO: 48268 - protein, 13 aa, Homo sapiens
DVTATPARLLFFA

SEQ ID NO: 48269 - protein, 13 aa, Homo sapiens
VTATPARLLFFAP

SEQ ID NO: 48270 - protein, 13 aa, Homo sapiens
TATPARLLFFAPT

SEQ ID NO: 48271 - protein, 13 aa, Homo sapiens
ATPARLLFFAPTR

SEQ ID NO: 48272 - protein, 13 aa, Homo sapiens
TPARLLFFAPTRR

SEQ ID NO: 48273 - protein, 13 aa, Homo sapiens
PARLLFFAPTRRA

SEQ ID NO: 48274 - protein, 13 aa, Homo sapiens
ARLLFFAPTRRAA

SEQ ID NO: 48275 - protein, 13 aa, Homo sapiens
RLLFFAPTRRAAP

SEQ ID NO: 48276 - protein, 13 aa, Homo sapiens
LLFFAPTRRAAPL

SEQ ID NO: 48277 - protein, 13 aa, Homo sapiens
LFFAPTRRAAPLE

SEQ ID NO: 48278 - protein, 13 aa, Homo sapiens
FFAPTRRAAPLEE

SEQ ID NO: 48279 - protein, 13 aa, Homo sapiens
FAPTRRAAPLEEM

SEQ ID NO: 48280 - protein, 13 aa, Homo sapiens
APTRRAAPLEEME

SEQ ID NO: 48281 - protein, 13 aa, Homo sapiens
PTRRAAPLEEMEA

SEQ ID NO: 48282 - protein, 13 aa, Homo sapiens
TRRAAPLEEMEAP

SEQ ID NO: 48283 - protein, 13 aa, Homo sapiens
RRAAPLEEMEAPA

SEQ ID NO: 48284 - protein, 13 aa, Homo sapiens
RAAPLEEMEAPAA

SEQ ID NO: 48285 - protein, 13 aa, Homo sapiens
AAPLEEMEAPAAD

SEQ ID NO: 48286 - protein, 13 aa, Homo sapiens
APLEEMEAPAADA

SEQ ID NO: 48287 - protein, 13 aa, Homo sapiens
PLEEMEAPAADAI

SEQ ID NO: 48288 - protein, 13 aa, Homo sapiens
LEEMEAPAADAIM

SEQ ID NO: 48289 - protein, 13 aa, Homo sapiens
EEMEAPAADAIMS

SEQ ID NO: 48290 - protein, 13 aa, Homo sapiens
EMEAPAADAIMSP

SEQ ID NO: 48291 - protein, 13 aa, Homo sapiens
MEAPAADAIMSPE

SEQ ID NO: 48292 - protein, 13 aa, Homo sapiens
EAPAADAIMSPEE

SEQ ID NO: 48293 - protein, 13 aa, Homo sapiens
APAADAIMSPEEE

SEQ ID NO: 48294 - protein, 13 aa, Homo sapiens
PAADAIMSPEEEL

SEQ ID NO: 48295 - protein, 13 aa, Homo sapiens
AADAIMSPEEELD

SEQ ID NO: 48296 - protein, 13 aa, Homo sapiens
ADAIMSPEEELDG

SEQ ID NO: 48297 - protein, 13 aa, Homo sapiens
DAIMSPEEELDGY

SEQ ID NO: 48298 - protein, 13 aa, Homo sapiens
AIMSPEEELDGYE

SEQ ID NO: 48299 - protein, 13 aa, Homo sapiens
IMSPEEELDGYEP

SEQ ID NO: 48300 - protein, 13 aa, Homo sapiens
MSPEEELDGYEPE

SEQ ID NO: 48301 - protein, 13 aa, Homo sapiens
SPEEELDGYEPEP

SEQ ID NO: 48302 - protein, 13 aa, Homo sapiens
PEEELDGYEPEPL

SEQ ID NO: 48303 - protein, 13 aa, Homo sapiens
EEELDGYEPEPLG

SEQ ID NO: 48304 - protein, 13 aa, Homo sapiens
EELDGYEPEPLGK

SEQ ID NO: 48305 - protein, 13 aa, Homo sapiens
ELDGYEPEPLGKR

SEQ ID NO: 48306 - protein, 13 aa, Homo sapiens
LDGYEPEPLGKRP

SEQ ID NO: 48307 - protein, 13 aa, Homo sapiens
DGYEPEPLGKRPA

SEQ ID NO: 48308 - protein, 13 aa, Homo sapiens
GYEPEPLGKRPAV

SEQ ID NO: 48309 - protein, 13 aa, Homo sapiens
YEPEPLGKRPAVL

SEQ ID NO: 48310 - protein, 13 aa, Homo sapiens
EPEPLGKRPAVLP

SEQ ID NO: 48311 - protein, 13 aa, Homo sapiens
PEPLGKRPAVLPL

SEQ ID NO: 48312 - protein, 13 aa, Homo sapiens
EPLGKRPAVLPLL

SEQ ID NO: 48313 - protein, 13 aa, Homo sapiens
PLGKRPAVLPLLE

SEQ ID NO: 48314 - protein, 13 aa, Homo sapiens
LGKRPAVLPLLEL

SEQ ID NO: 48315 - protein, 13 aa, Homo sapiens
GKRPAVLPLLELV

SEQ ID NO: 48316 - protein, 13 aa, Homo sapiens
KRPAVLPLLELVG

SEQ ID NO: 48317 - protein, 13 aa, Homo sapiens
RPAVLPLLELVGE

SEQ ID NO: 48318 - protein, 13 aa, Homo sapiens
PAVLPLLELVGES

SEQ ID NO: 48319 - protein, 13 aa, Homo sapiens
AVLPLLELVGESG

SEQ ID NO: 48320 - protein, 13 aa, Homo sapiens
VLPLLELVGESGN

SEQ ID NO: 48321 - protein, 13 aa, Homo sapiens
LPLLELVGESGNN

SEQ ID NO: 48322 - protein, 13 aa, Homo sapiens
PLLELVGESGNNT

SEQ ID NO: 48323 - protein, 13 aa, Homo sapiens
LLELVGESGNNTS

SEQ ID NO: 48324 - protein, 13 aa, Homo sapiens
LELVGESGNNTST

SEQ ID NO: 48325 - protein, 13 aa, Homo sapiens
ELVGESGNNTSTD

SEQ ID NO: 48326 - protein, 13 aa, Homo sapiens
LVGESGNNTSTDG

SEQ ID NO: 48327 - protein, 13 aa, Homo sapiens
VGESGNNTSTDGS

SEQ ID NO: 48328 - protein, 13 aa, Homo sapiens
GESGNNTSTDGSL

SEQ ID NO: 48329 - protein, 13 aa, Homo sapiens
ESGNNTSTDGSLP

SEQ ID NO: 48330 - protein, 13 aa, Homo sapiens
SGNNTSTDGSLPS

SEQ ID NO: 48331 - protein, 13 aa, Homo sapiens
GNNTSTDGSLPST

SEQ ID NO: 48332 - protein, 13 aa, Homo sapiens
NNTSTDGSLPSTP

SEQ ID NO: 48333 - protein, 13 aa, Homo sapiens
NTSTDGSLPSTPP

SEQ ID NO: 48334 - protein, 13 aa, Homo sapiens
TSTDGSLPSTPPP

SEQ ID NO: 48335 - protein, 13 aa, Homo sapiens
STDGSLPSTPPPA

SEQ ID NO: 48336 - protein, 13 aa, Homo sapiens
TDGSLPSTPPPAE

SEQ ID NO: 48337 - protein, 13 aa, Homo sapiens
DGSLPSTPPPAEE

SEQ ID NO: 48338 - protein, 13 aa, Homo sapiens
GSLPSTPPPAEEE

SEQ ID NO: 48339 - protein, 13 aa, Homo sapiens
SLPSTPPPAEEEE

SEQ ID NO: 48340 - protein, 13 aa, Homo sapiens
LPSTPPPAEEEED

SEQ ID NO: 48341 - protein, 13 aa, Homo sapiens
PSTPPPAEEEEDD

SEQ ID NO: 48342 - protein, 13 aa, Homo sapiens
STPPPAEEEEDDL

SEQ ID NO: 48343 - protein, 13 aa, Homo sapiens
TPPPAEEEEDDLY

SEQ ID NO: 48344 - protein, 13 aa, Homo sapiens
PPPAEEEEDDLYR

SEQ ID NO: 48345 - protein, 13 aa, Homo sapiens
PPAEEEEDDLYRQ

SEQ ID NO: 48346 - protein, 13 aa, Homo sapiens
PAEEEEDDLYRQS

SEQ ID NO: 48347 - protein, 13 aa, Homo sapiens
AEEEEDDLYRQSL

SEQ ID NO: 48348 - protein, 13 aa, Homo sapiens
EEEEDDLYRQSLE

SEQ ID NO: 48349 - protein, 13 aa, Homo sapiens
EEEDDLYRQSLEI

SEQ ID NO: 48350 - protein, 13 aa, Homo sapiens
EEDDLYRQSLEII

SEQ ID NO: 48351 - protein, 13 aa, Homo sapiens
EDDLYRQSLEIIS

SEQ ID NO: 48352 - protein, 13 aa, Homo sapiens
DDLYRQSLEIISR

SEQ ID NO: 48353 - protein, 13 aa, Homo sapiens
DLYRQSLEIISRY

SEQ ID NO: 48354 - protein, 13 aa, Homo sapiens
LYRQSLEIISRYL

SEQ ID NO: 48355 - protein, 13 aa, Homo sapiens
YRQSLEIISRYLR

SEQ ID NO: 48356 - protein, 13 aa, Homo sapiens
RQSLEIISRYLRE

SEQ ID NO: 48357 - protein, 13 aa, Homo sapiens
QSLEIISRYLREQ

SEQ ID NO: 48358 - protein, 13 aa, Homo sapiens
SLEIISRYLREQA

SEQ ID NO: 48359 - protein, 13 aa, Homo sapiens
LEIISRYLREQAT

SEQ ID NO: 48360 - protein, 13 aa, Homo sapiens
EIISRYLREQATG

SEQ ID NO: 48361 - protein, 13 aa, Homo sapiens
IISRYLREQATGA

SEQ ID NO: 48362 - protein, 13 aa, Homo sapiens
ISRYLREQATGAK

SEQ ID NO: 48363 - protein, 13 aa, Homo sapiens
SRYLREQATGAKD

SEQ ID NO: 48364 - protein, 13 aa, Homo sapiens
RYLREQATGAKDT

SEQ ID NO: 48365 - protein, 13 aa, Homo sapiens
YLREQATGAKDTK

SEQ ID NO: 48366 - protein, 13 aa, Homo sapiens
LREQATGAKDTKP

SEQ ID NO: 48367 - protein, 13 aa, Homo sapiens
REQATGAKDTKPM

SEQ ID NO: 48368 - protein, 13 aa, Homo sapiens
EQATGAKDTKPMG

SEQ ID NO: 48369 - protein, 13 aa, Homo sapiens
QATGAKDTKPMGR

SEQ ID NO: 48370 - protein, 13 aa, Homo sapiens
ATGAKDTKPMGRS

SEQ ID NO: 48371 - protein, 13 aa, Homo sapiens
TGAKDTKPMGRSG

SEQ ID NO: 48372 - protein, 13 aa, Homo sapiens
GAKDTKPMGRSGA

SEQ ID NO: 48373 - protein, 13 aa, Homo sapiens
AKDTKPMGRSGAT

SEQ ID NO: 48374 - protein, 13 aa, Homo sapiens
KDTKPMGRSGATS

SEQ ID NO: 48375 - protein, 13 aa, Homo sapiens
DTKPMGRSGATSR

SEQ ID NO: 48376 - protein, 13 aa, Homo sapiens
TKPMGRSGATSRK

SEQ ID NO: 48377 - protein, 13 aa, Homo sapiens
KPMGRSGATSRKA

SEQ ID NO: 48378 - protein, 13 aa, Homo sapiens
PMGRSGATSRKAL

SEQ ID NO: 48379 - protein, 13 aa, Homo sapiens
MGRSGATSRKALE

SEQ ID NO: 48380 - protein, 13 aa, Homo sapiens
GRSGATSRKALET

SEQ ID NO: 48381 - protein, 13 aa, Homo sapiens
RSGATSRKALETL

SEQ ID NO: 48382 - protein, 13 aa, Homo sapiens
SGATSRKALETLR

SEQ ID NO: 48383 - protein, 13 aa, Homo sapiens
GATSRKALETLRR

SEQ ID NO: 48384 - protein, 13 aa, Homo sapiens
ATSRKALETLRRV

SEQ ID NO: 48385 - protein, 13 aa, Homo sapiens
TSRKALETLRRVG

SEQ ID NO: 48386 - protein, 13 aa, Homo sapiens
SRKALETLRRVGD

SEQ ID NO: 48387 - protein, 13 aa, Homo sapiens
RKALETLRRVGDG

SEQ ID NO: 48388 - protein, 13 aa, Homo sapiens
KALETLRRVGDGV

SEQ ID NO: 48389 - protein, 13 aa, Homo sapiens
ALETLRRVGDGVQ

SEQ ID NO: 48390 - protein, 13 aa, Homo sapiens
LETLRRVGDGVQR

SEQ ID NO: 48391 - protein, 13 aa, Homo sapiens
ETLRRVGDGVQRN

SEQ ID NO: 48392 - protein, 13 aa, Homo sapiens
TLRRVGDGVQRNH

SEQ ID NO: 48393 - protein, 13 aa, Homo sapiens
LRRVGDGVQRNHE

SEQ ID NO: 48394 - protein, 13 aa, Homo sapiens
RRVGDGVQRNHET

SEQ ID NO: 48395 - protein, 13 aa, Homo sapiens
RVGDGVQRNHETA

SEQ ID NO: 48396 - protein, 13 aa, Homo sapiens
VGDGVQRNHETAF

SEQ ID NO: 48397 - protein, 13 aa, Homo sapiens
GDGVQRNHETAFQ

SEQ ID NO: 48398 - protein, 13 aa, Homo sapiens
DGVQRNHETAFQG

SEQ ID NO: 48399 - protein, 13 aa, Homo sapiens
GVQRNHETAFQGM

SEQ ID NO: 48400 - protein, 13 aa, Homo sapiens
VQRNHETAFQGML

SEQ ID NO: 48401 - protein, 13 aa, Homo sapiens
QRNHETAFQGMLR

SEQ ID NO: 48402 - protein, 13 aa, Homo sapiens
RNHETAFQGMLRK

SEQ ID NO: 48403 - protein, 13 aa, Homo sapiens
NHETAFQGMLRKL

SEQ ID NO: 48404 - protein, 13 aa, Homo sapiens
HETAFQGMLRKLD

SEQ ID NO: 48405 - protein, 13 aa, Homo sapiens
ETAFQGMLRKLDI

SEQ ID NO: 48406 - protein, 13 aa, Homo sapiens
TAFQGMLRKLDIK

SEQ ID NO: 48407 - protein, 13 aa, Homo sapiens
AFQGMLRKLDIKN

SEQ ID NO: 48408 - protein, 13 aa, Homo sapiens
FQGMLRKLDIKNE

SEQ ID NO: 48409 - protein, 13 aa, Homo sapiens
QGMLRKLDIKNED

SEQ ID NO: 48410 - protein, 13 aa, Homo sapiens
GMLRKLDIKNEDD

SEQ ID NO: 48411 - protein, 13 aa, Homo sapiens
MLRKLDIKNEDDV

SEQ ID NO: 48412 - protein, 13 aa, Homo sapiens
LRKLDIKNEDDVK

SEQ ID NO: 48413 - protein, 13 aa, Homo sapiens
RKLDIKNEDDVKS

SEQ ID NO: 48414 - protein, 13 aa, Homo sapiens
KLDIKNEDDVKSL

SEQ ID NO: 48415 - protein, 13 aa, Homo sapiens
LDIKNEDDVKSLS

SEQ ID NO: 48416 - protein, 13 aa, Homo sapiens
DIKNEDDVKSLSR

SEQ ID NO: 48417 - protein, 13 aa, Homo sapiens
IKNEDDVKSLSRV

SEQ ID NO: 48418 - protein, 13 aa, Homo sapiens
KNEDDVKSLSRVM

SEQ ID NO: 48419 - protein, 13 aa, Homo sapiens
NEDDVKSLSRVMI

SEQ ID NO: 48420 - protein, 13 aa, Homo sapiens
EDDVKSLSRVMIH

SEQ ID NO: 48421 - protein, 13 aa, Homo sapiens
DDVKSLSRVMIHV

SEQ ID NO: 48422 - protein, 13 aa, Homo sapiens
DVKSLSRVMIHVF

SEQ ID NO: 48423 - protein, 13 aa, Homo sapiens
VKSLSRVMIHVFS

SEQ ID NO: 48424 - protein, 13 aa, Homo sapiens
KSLSRVMIHVFSD

SEQ ID NO: 48425 - protein, 13 aa, Homo sapiens
SLSRVMIHVFSDG

SEQ ID NO: 48426 - protein, 13 aa, Homo sapiens
LSRVMIHVFSDGV

SEQ ID NO: 48427 - protein, 13 aa, Homo sapiens
SRVMIHVFSDGVT

SEQ ID NO: 48428 - protein, 13 aa, Homo sapiens
RVMIHVFSDGVTN

SEQ ID NO: 48429 - protein, 13 aa, Homo sapiens
VMIHVFSDGVTNW

SEQ ID NO: 48430 - protein, 13 aa, Homo sapiens
MIHVFSDGVTNWG

SEQ ID NO: 48431 - protein, 13 aa, Homo sapiens
IHVFSDGVTNWGR

SEQ ID NO: 48432 - protein, 13 aa, Homo sapiens
HVFSDGVTNWGRI

SEQ ID NO: 48433 - protein, 13 aa, Homo sapiens
VFSDGVTNWGRIV

SEQ ID NO: 48434 - protein, 13 aa, Homo sapiens
FSDGVTNWGRIVT

SEQ ID NO: 48435 - protein, 13 aa, Homo sapiens
SDGVTNWGRIVTL

SEQ ID NO: 48436 - protein, 13 aa, Homo sapiens
DGVTNWGRIVTLI

SEQ ID NO: 48437 - protein, 13 aa, Homo sapiens
GVTNWGRIVTLIS

SEQ ID NO: 48438 - protein, 13 aa, Homo sapiens
VTNWGRIVTLISF

SEQ ID NO: 48439 - protein, 13 aa, Homo sapiens
TNWGRIVTLISFG

SEQ ID NO: 48440 - protein, 13 aa, Homo sapiens
NWGRIVTLISFGA

SEQ ID NO: 48441 - protein, 13 aa, Homo sapiens
WGRIVTLISFGAF

SEQ ID NO: 48442 - protein, 13 aa, Homo sapiens
GRIVTLISFGAFV

SEQ ID NO: 48443 - protein, 13 aa, Homo sapiens
RIVTLISFGAFVA

SEQ ID NO: 48444 - protein, 13 aa, Homo sapiens
IVTLISFGAFVAK

SEQ ID NO: 48445 - protein, 13 aa, Homo sapiens
VTLISFGAFVAKH

SEQ ID NO: 48446 - protein, 13 aa, Homo sapiens
TLISFGAFVAKHL

SEQ ID NO: 48447 - protein, 13 aa, Homo sapiens
LISFGAFVAKHLK

SEQ ID NO: 48448 - protein, 13 aa, Homo sapiens
ISFGAFVAKHLKT

SEQ ID NO: 48449 - protein, 13 aa, Homo sapiens
SFGAFVAKHLKTI

SEQ ID NO: 48450 - protein, 13 aa, Homo sapiens
FGAFVAKHLKTIN

SEQ ID NO: 48451 - protein, 13 aa, Homo sapiens
GAFVAKHLKTINQ

SEQ ID NO: 48452 - protein, 13 aa, Homo sapiens
AFVAKHLKTINQE

SEQ ID NO: 48453 - protein, 13 aa, Homo sapiens
FVAKHLKTINQES

SEQ ID NO: 48454 - protein, 13 aa, Homo sapiens
VAKHLKTINQESC

SEQ ID NO: 48455 - protein, 13 aa, Homo sapiens
AKHLKTINQESCI

SEQ ID NO: 48456 - protein, 13 aa, Homo sapiens
KHLKTINQESCIE

SEQ ID NO: 48457 - protein, 13 aa, Homo sapiens
HLKTINQESCIEP

SEQ ID NO: 48458 - protein, 13 aa, Homo sapiens
LKTINQESCIEPL

SEQ ID NO: 48459 - protein, 13 aa, Homo sapiens
KTINQESCIEPLA

SEQ ID NO: 48460 - protein, 13 aa, Homo sapiens
TINQESCIEPLAE

SEQ ID NO: 48461 - protein, 13 aa, Homo sapiens
INQESCIEPLAES

SEQ ID NO: 48462 - protein, 13 aa, Homo sapiens
NQESCIEPLAESI

SEQ ID NO: 48463 - protein, 13 aa, Homo sapiens
QESCIEPLAESIT

SEQ ID NO: 48464 - protein, 13 aa, Homo sapiens
ESCIEPLAESITD

SEQ ID NO: 48465 - protein, 13 aa, Homo sapiens
SCIEPLAESITDV

SEQ ID NO: 48466 - protein, 13 aa, Homo sapiens
CIEPLAESITDVL

SEQ ID NO: 48467 - protein, 13 aa, Homo sapiens
IEPLAESITDVLV

SEQ ID NO: 48468 - protein, 13 aa, Homo sapiens
EPLAESITDVLVR

SEQ ID NO: 48469 - protein, 13 aa, Homo sapiens
PLAESITDVLVRT

SEQ ID NO: 48470 - protein, 13 aa, Homo sapiens
LAESITDVLVRTK

SEQ ID NO: 48471 - protein, 13 aa, Homo sapiens
AESITDVLVRTKR

SEQ ID NO: 48472 - protein, 13 aa, Homo sapiens
ESITDVLVRTKRD

SEQ ID NO: 48473 - protein, 13 aa, Homo sapiens
SITDVLVRTKRDW

SEQ ID NO: 48474 - protein, 13 aa, Homo sapiens
ITDVLVRTKRDWL

SEQ ID NO: 48475 - protein, 13 aa, Homo sapiens
TDVLVRTKRDWLV

SEQ ID NO: 48476 - protein, 13 aa, Homo sapiens
DVLVRTKRDWLVK

SEQ ID NO: 48477 - protein, 13 aa, Homo sapiens
VLVRTKRDWLVKQ

SEQ ID NO: 48478 - protein, 13 aa, Homo sapiens
LVRTKRDWLVKQR

SEQ ID NO: 48479 - protein, 13 aa, Homo sapiens
VRTKRDWLVKQRG

SEQ ID NO: 48480 - protein, 13 aa, Homo sapiens
RTKRDWLVKQRGW

SEQ ID NO: 48481 - protein, 13 aa, Homo sapiens
TKRDWLVKQRGWD

SEQ ID NO: 48482 - protein, 13 aa, Homo sapiens
KRDWLVKQRGWDG

SEQ ID NO: 48483 - protein, 13 aa, Homo sapiens
RDWLVKQRGWDGF

SEQ ID NO: 48484 - protein, 13 aa, Homo sapiens
DWLVKQRGWDGFV

SEQ ID NO: 48485 - protein, 13 aa, Homo sapiens
WLVKQRGWDGFVE

SEQ ID NO: 48486 - protein, 13 aa, Homo sapiens
LVKQRGWDGFVEF

SEQ ID NO: 48487 - protein, 13 aa, Homo sapiens
VKQRGWDGFVEFF

SEQ ID NO: 48488 - protein, 13 aa, Homo sapiens
KQRGWDGFVEFFH

SEQ ID NO: 48489 - protein, 13 aa, Homo sapiens
QRGWDGFVEFFHV

SEQ ID NO: 48490 - protein, 13 aa, Homo sapiens
RGWDGFVEFFHVE

SEQ ID NO: 48491 - protein, 13 aa, Homo sapiens
GWDGFVEFFHVED

SEQ ID NO: 48492 - protein, 13 aa, Homo sapiens
WDGFVEFFHVEDL

SEQ ID NO: 48493 - protein, 13 aa, Homo sapiens
DGFVEFFHVEDLE

SEQ ID NO: 48494 - protein, 13 aa, Homo sapiens
GFVEFFHVEDLEG

SEQ ID NO: 48495 - protein, 13 aa, Homo sapiens
FVEFFHVEDLEGG

SEQ ID NO: 48496 - protein, 13 aa, Homo sapiens
VEFFHVEDLEGGI

SEQ ID NO: 48497 - protein, 13 aa, Homo sapiens
EFFHVEDLEGGIR

SEQ ID NO: 48498 - protein, 13 aa, Homo sapiens
FFHVEDLEGGIRN

SEQ ID NO: 48499 - protein, 13 aa, Homo sapiens
FHVEDLEGGIRNV

SEQ ID NO: 48500 - protein, 13 aa, Homo sapiens
HVEDLEGGIRNVL

SEQ ID NO: 48501 - protein, 13 aa, Homo sapiens
VEDLEGGIRNVLL

SEQ ID NO: 48502 - protein, 13 aa, Homo sapiens
EDLEGGIRNVLLA

SEQ ID NO: 48503 - protein, 13 aa, Homo sapiens
DLEGGIRNVLLAF

SEQ ID NO: 48504 - protein, 13 aa, Homo sapiens
LEGGIRNVLLAFA

SEQ ID NO: 48505 - protein, 13 aa, Homo sapiens
EGGIRNVLLAFAG

SEQ ID NO: 48506 - protein, 13 aa, Homo sapiens
GGIRNVLLAFAGV

SEQ ID NO: 48507 - protein, 13 aa, Homo sapiens
GIRNVLLAFAGVA

SEQ ID NO: 48508 - protein, 13 aa, Homo sapiens
IRNVLLAFAGVAG

SEQ ID NO: 48509 - protein, 13 aa, Homo sapiens
RNVLLAFAGVAGV

SEQ ID NO: 48510 - protein, 13 aa, Homo sapiens
NVLLAFAGVAGVG

SEQ ID NO: 48511 - protein, 13 aa, Homo sapiens
VLLAFAGVAGVGA

SEQ ID NO: 48512 - protein, 13 aa, Homo sapiens
LLAFAGVAGVGAG

SEQ ID NO: 48513 - protein, 13 aa, Homo sapiens
LAFAGVAGVGAGL

SEQ ID NO: 48514 - protein, 13 aa, Homo sapiens
AFAGVAGVGAGLA

SEQ ID NO: 48515 - protein, 13 aa, Homo sapiens
FAGVAGVGAGLAY

SEQ ID NO: 48516 - protein, 13 aa, Homo sapiens
AGVAGVGAGLAYL

SEQ ID NO: 48517 - protein, 13 aa, Homo sapiens
GVAGVGAGLAYLI

SEQ ID NO: 48518 - protein, 13 aa, Homo sapiens
VAGVGAGLAYLIR

SEQ ID NO: 48519 - protein, 14 aa, Homo sapiens
MFGLKRNAVIGLNL

SEQ ID NO: 48520 - protein, 14 aa, Homo sapiens
FGLKRNAVIGLNLY

SEQ ID NO: 48521 - protein, 14 aa, Homo sapiens
GLKRNAVIGLNLYC

SEQ ID NO: 48522 - protein, 14 aa, Homo sapiens
LKRNAVIGLNLYCG

SEQ ID NO: 48523 - protein, 14 aa, Homo sapiens
KRNAVIGLNLYCGG

SEQ ID NO: 48524 - protein, 14 aa, Homo sapiens
RNAVIGLNLYCGGA

SEQ ID NO: 48525 - protein, 14 aa, Homo sapiens
NAVIGLNLYCGGAG

SEQ ID NO: 48526 - protein, 14 aa, Homo sapiens
AVIGLNLYCGGAGL

SEQ ID NO: 48527 - protein, 14 aa, Homo sapiens
VIGLNLYCGGAGLG

SEQ ID NO: 48528 - protein, 14 aa, Homo sapiens
IGLNLYCGGAGLGA

SEQ ID NO: 48529 - protein, 14 aa, Homo sapiens
GLNLYCGGAGLGAG

SEQ ID NO: 48530 - protein, 14 aa, Homo sapiens
LNLYCGGAGLGAGS

SEQ ID NO: 48531 - protein, 14 aa, Homo sapiens
NLYCGGAGLGAGSG

SEQ ID NO: 48532 - protein, 14 aa, Homo sapiens
LYCGGAGLGAGSGG

SEQ ID NO: 48533 - protein, 14 aa, Homo sapiens
YCGGAGLGAGSGGA

SEQ ID NO: 48534 - protein, 14 aa, Homo sapiens
CGGAGLGAGSGGAT

SEQ ID NO: 48535 - protein, 14 aa, Homo sapiens
GGAGLGAGSGGATR

SEQ ID NO: 48536 - protein, 14 aa, Homo sapiens
GAGLGAGSGGATRP

SEQ ID NO: 48537 - protein, 14 aa, Homo sapiens
AGLGAGSGGATRPG

SEQ ID NO: 48538 - protein, 14 aa, Homo sapiens
GLGAGSGGATRPGG

SEQ ID NO: 48539 - protein, 14 aa, Homo sapiens
LGAGSGGATRPGGR

SEQ ID NO: 48540 - protein, 14 aa, Homo sapiens
GAGSGGATRPGGRL

SEQ ID NO: 48541 - protein, 14 aa, Homo sapiens
AGSGGATRPGGRLL

SEQ ID NO: 48542 - protein, 14 aa, Homo sapiens
GSGGATRPGGRLLA

SEQ ID NO: 48543 - protein, 14 aa, Homo sapiens
SGGATRPGGRLLAT

SEQ ID NO: 48544 - protein, 14 aa, Homo sapiens
GGATRPGGRLLATE

SEQ ID NO: 48545 - protein, 14 aa, Homo sapiens
GATRPGGRLLATEK

SEQ ID NO: 48546 - protein, 14 aa, Homo sapiens
ATRPGGRLLATEKE

SEQ ID NO: 48547 - protein, 14 aa, Homo sapiens
TRPGGRLLATEKEA

SEQ ID NO: 48548 - protein, 14 aa, Homo sapiens
RPGGRLLATEKEAS

SEQ ID NO: 48549 - protein, 14 aa, Homo sapiens
PGGRLLATEKEASA

SEQ ID NO: 48550 - protein, 14 aa, Homo sapiens
GGRLLATEKEASAR

SEQ ID NO: 48551 - protein, 14 aa, Homo sapiens
GRLLATEKEASARR

SEQ ID NO: 48552 - protein, 14 aa, Homo sapiens
RLLATEKEASARRE

SEQ ID NO: 48553 - protein, 14 aa, Homo sapiens
LLATEKEASARREI

SEQ ID NO: 48554 - protein, 14 aa, Homo sapiens
LATEKEASARREIG

SEQ ID NO: 48555 - protein, 14 aa, Homo sapiens
ATEKEASARREIGG

SEQ ID NO: 48556 - protein, 14 aa, Homo sapiens
TEKEASARREIGGG

SEQ ID NO: 48557 - protein, 14 aa, Homo sapiens
EKEASARREIGGGE

SEQ ID NO: 48558 - protein, 14 aa, Homo sapiens
KEASARREIGGGEA

SEQ ID NO: 48559 - protein, 14 aa, Homo sapiens
EASARREIGGGEAG

SEQ ID NO: 48560 - protein, 14 aa, Homo sapiens
ASARREIGGGEAGA

SEQ ID NO: 48561 - protein, 14 aa, Homo sapiens
SARREIGGGEAGAV

SEQ ID NO: 48562 - protein, 14 aa, Homo sapiens
ARREIGGGEAGAVI

SEQ ID NO: 48563 - protein, 14 aa, Homo sapiens
RREIGGGEAGAVIG

SEQ ID NO: 48564 - protein, 14 aa, Homo sapiens
REIGGGEAGAVIGG

SEQ ID NO: 48565 - protein, 14 aa, Homo sapiens
EIGGGEAGAVIGGS

SEQ ID NO: 48566 - protein, 14 aa, Homo sapiens
IGGGEAGAVIGGSA

SEQ ID NO: 48567 - protein, 14 aa, Homo sapiens
GGGEAGAVIGGSAG

SEQ ID NO: 48568 - protein, 14 aa, Homo sapiens
GGEAGAVIGGSAGA

SEQ ID NO: 48569 - protein, 14 aa, Homo sapiens
GEAGAVIGGSAGAS

SEQ ID NO: 48570 - protein, 14 aa, Homo sapiens
EAGAVIGGSAGASP

SEQ ID NO: 48571 - protein, 14 aa, Homo sapiens
AGAVIGGSAGASPP

SEQ ID NO: 48572 - protein, 14 aa, Homo sapiens
GAVIGGSAGASPPS

SEQ ID NO: 48573 - protein, 14 aa, Homo sapiens
AVIGGSAGASPPST

SEQ ID NO: 48574 - protein, 14 aa, Homo sapiens
VIGGSAGASPPSTL

SEQ ID NO: 48575 - protein, 14 aa, Homo sapiens
IGGSAGASPPSTLT

SEQ ID NO: 48576 - protein, 14 aa, Homo sapiens
GGSAGASPPSTLTP

SEQ ID NO: 48577 - protein, 14 aa, Homo sapiens
GSAGASPPSTLTPD

SEQ ID NO: 48578 - protein, 14 aa, Homo sapiens
SAGASPPSTLTPDS

SEQ ID NO: 48579 - protein, 14 aa, Homo sapiens
AGASPPSTLTPDSR

SEQ ID NO: 48580 - protein, 14 aa, Homo sapiens
GASPPSTLTPDSRR

SEQ ID NO: 48581 - protein, 14 aa, Homo sapiens
ASPPSTLTPDSRRV

SEQ ID NO: 48582 - protein, 14 aa, Homo sapiens
SPPSTLTPDSRRVA

SEQ ID NO: 48583 - protein, 14 aa, Homo sapiens
PPSTLTPDSRRVAR

SEQ ID NO: 48584 - protein, 14 aa, Homo sapiens
PSTLTPDSRRVARP

SEQ ID NO: 48585 - protein, 14 aa, Homo sapiens
STLTPDSRRVARPP

SEQ ID NO: 48586 - protein, 14 aa, Homo sapiens
TLTPDSRRVARPPP

SEQ ID NO: 48587 - protein, 14 aa, Homo sapiens
LTPDSRRVARPPPI

SEQ ID NO: 48588 - protein, 14 aa, Homo sapiens
TPDSRRVARPPPIG

SEQ ID NO: 48589 - protein, 14 aa, Homo sapiens
PDSRRVARPPPIGA

SEQ ID NO: 48590 - protein, 14 aa, Homo sapiens
DSRRVARPPPIGAE

SEQ ID NO: 48591 - protein, 14 aa, Homo sapiens
SRRVARPPPIGAEV

SEQ ID NO: 48592 - protein, 14 aa, Homo sapiens
RRVARPPPIGAEVP

SEQ ID NO: 48593 - protein, 14 aa, Homo sapiens
RVARPPPIGAEVPD

SEQ ID NO: 48594 - protein, 14 aa, Homo sapiens
VARPPPIGAEVPDV

SEQ ID NO: 48595 - protein, 14 aa, Homo sapiens
ARPPPIGAEVPDVT

SEQ ID NO: 48596 - protein, 14 aa, Homo sapiens
RPPPIGAEVPDVTA

SEQ ID NO: 48597 - protein, 14 aa, Homo sapiens
PPPIGAEVPDVTAT

SEQ ID NO: 48598 - protein, 14 aa, Homo sapiens
PPIGAEVPDVTATP

SEQ ID NO: 48599 - protein, 14 aa, Homo sapiens
PIGAEVPDVTATPA

SEQ ID NO: 48600 - protein, 14 aa, Homo sapiens
IGAEVPDVTATPAR

SEQ ID NO: 48601 - protein, 14 aa, Homo sapiens
GAEVPDVTATPARL

SEQ ID NO: 48602 - protein, 14 aa, Homo sapiens
AEVPDVTATPARLL

SEQ ID NO: 48603 - protein, 14 aa, Homo sapiens
EVPDVTATPARLLF

SEQ ID NO: 48604 - protein, 14 aa, Homo sapiens
VPDVTATPARLLFF

SEQ ID NO: 48605 - protein, 14 aa, Homo sapiens
PDVTATPARLLFFA

SEQ ID NO: 48606 - protein, 14 aa, Homo sapiens
DVTATPARLLFFAP

SEQ ID NO: 48607 - protein, 14 aa, Homo sapiens
VTATPARLLFFAPT

SEQ ID NO: 48608 - protein, 14 aa, Homo sapiens
TATPARLLFFAPTR

SEQ ID NO: 48609 - protein, 14 aa, Homo sapiens
ATPARLLFFAPTRR

SEQ ID NO: 48610 - protein, 14 aa, Homo sapiens
TPARLLFFAPTRRA

SEQ ID NO: 48611 - protein, 14 aa, Homo sapiens
PARLLFFAPTRRAA

SEQ ID NO: 48612 - protein, 14 aa, Homo sapiens
ARLLFFAPTRRAAP

SEQ ID NO: 48613 - protein, 14 aa, Homo sapiens
RLLFFAPTRRAAPL

SEQ ID NO: 48614 - protein, 14 aa, Homo sapiens
LLFFAPTRRAAPLE

SEQ ID NO: 48615 - protein, 14 aa, Homo sapiens
LFFAPTRRAAPLEE

SEQ ID NO: 48616 - protein, 14 aa, Homo sapiens
FFAPTRRAAPLEEM

SEQ ID NO: 48617 - protein, 14 aa, Homo sapiens
FAPTRRAAPLEEME

SEQ ID NO: 48618 - protein, 14 aa, Homo sapiens
APTRRAAPLEEMEA

SEQ ID NO: 48619 - protein, 14 aa, Homo sapiens
PTRRAAPLEEMEAP

SEQ ID NO: 48620 - protein, 14 aa, Homo sapiens
TRRAAPLEEMEAPA

SEQ ID NO: 48621 - protein, 14 aa, Homo sapiens
RRAAPLEEMEAPAA

SEQ ID NO: 48622 - protein, 14 aa, Homo sapiens
RAAPLEEMEAPAAD

SEQ ID NO: 48623 - protein, 14 aa, Homo sapiens
AAPLEEMEAPAADA

SEQ ID NO: 48624 - protein, 14 aa, Homo sapiens
APLEEMEAPAADAI

SEQ ID NO: 48625 - protein, 14 aa, Homo sapiens
PLEEMEAPAADAIM

SEQ ID NO: 48626 - protein, 14 aa, Homo sapiens
LEEMEAPAADAIMS

SEQ ID NO: 48627 - protein, 14 aa, Homo sapiens
EEMEAPAADAIMSP

SEQ ID NO: 48628 - protein, 14 aa, Homo sapiens
EMEAPAADAIMSPE

SEQ ID NO: 48629 - protein, 14 aa, Homo sapiens
MEAPAADAIMSPEE

SEQ ID NO: 48630 - protein, 14 aa, Homo sapiens
EAPAADAIMSPEEE

SEQ ID NO: 48631 - protein, 14 aa, Homo sapiens
APAADAIMSPEEEL

SEQ ID NO: 48632 - protein, 14 aa, Homo sapiens
PAADAIMSPEEELD

SEQ ID NO: 48633 - protein, 14 aa, Homo sapiens
AADAIMSPEEELDG

SEQ ID NO: 48634 - protein, 14 aa, Homo sapiens
ADAIMSPEEELDGY

SEQ ID NO: 48635 - protein, 14 aa, Homo sapiens
DAIMSPEEELDGYE

SEQ ID NO: 48636 - protein, 14 aa, Homo sapiens
AIMSPEEELDGYEP

SEQ ID NO: 48637 - protein, 14 aa, Homo sapiens
IMSPEEELDGYEPE

SEQ ID NO: 48638 - protein, 14 aa, Homo sapiens
MSPEEELDGYEPEP

SEQ ID NO: 48639 - protein, 14 aa, Homo sapiens
SPEEELDGYEPEPL

SEQ ID NO: 48640 - protein, 14 aa, Homo sapiens
PEEELDGYEPEPLG

SEQ ID NO: 48641 - protein, 14 aa, Homo sapiens
EEELDGYEPEPLGK

SEQ ID NO: 48642 - protein, 14 aa, Homo sapiens
EELDGYEPEPLGKR

SEQ ID NO: 48643 - protein, 14 aa, Homo sapiens
ELDGYEPEPLGKRP

SEQ ID NO: 48644 - protein, 14 aa, Homo sapiens
LDGYEPEPLGKRPA

SEQ ID NO: 48645 - protein, 14 aa, Homo sapiens
DGYEPEPLGKRPAV

SEQ ID NO: 48646 - protein, 14 aa, Homo sapiens
GYEPEPLGKRPAVL

SEQ ID NO: 48647 - protein, 14 aa, Homo sapiens
YEPEPLGKRPAVLP

SEQ ID NO: 48648 - protein, 14 aa, Homo sapiens
EPEPLGKRPAVLPL

SEQ ID NO: 48649 - protein, 14 aa, Homo sapiens
PEPLGKRPAVLPLL

SEQ ID NO: 48650 - protein, 14 aa, Homo sapiens
EPLGKRPAVLPLLE

SEQ ID NO: 48651 - protein, 14 aa, Homo sapiens
PLGKRPAVLPLLEL

SEQ ID NO: 48652 - protein, 14 aa, Homo sapiens
LGKRPAVLPLLELV

SEQ ID NO: 48653 - protein, 14 aa, Homo sapiens
GKRPAVLPLLELVG

SEQ ID NO: 48654 - protein, 14 aa, Homo sapiens
KRPAVLPLLELVGE

SEQ ID NO: 48655 - protein, 14 aa, Homo sapiens
RPAVLPLLELVGES

SEQ ID NO: 48656 - protein, 14 aa, Homo sapiens
PAVLPLLELVGESG

SEQ ID NO: 48657 - protein, 14 aa, Homo sapiens
AVLPLLELVGESGN

SEQ ID NO: 48658 - protein, 14 aa, Homo sapiens
VLPLLELVGESGNN

SEQ ID NO: 48659 - protein, 14 aa, Homo sapiens
LPLLELVGESGNNT

SEQ ID NO: 48660 - protein, 14 aa, Homo sapiens
PLLELVGESGNNTS

SEQ ID NO: 48661 - protein, 14 aa, Homo sapiens
LLELVGESGNNTST

SEQ ID NO: 48662 - protein, 14 aa, Homo sapiens
LELVGESGNNTSTD

SEQ ID NO: 48663 - protein, 14 aa, Homo sapiens
ELVGESGNNTSTDG

SEQ ID NO: 48664 - protein, 14 aa, Homo sapiens
LVGESGNNTSTDGS

SEQ ID NO: 48665 - protein, 14 aa, Homo sapiens
VGESGNNTSTDGSL

SEQ ID NO: 48666 - protein, 14 aa, Homo sapiens
GESGNNTSTDGSLP

SEQ ID NO: 48667 - protein, 14 aa, Homo sapiens
ESGNNTSTDGSLPS

SEQ ID NO: 48668 - protein, 14 aa, Homo sapiens
SGNNTSTDGSLPST

SEQ ID NO: 48669 - protein, 14 aa, Homo sapiens
GNNTSTDGSLPSTP

SEQ ID NO: 48670 - protein, 14 aa, Homo sapiens
NNTSTDGSLPSTPP

SEQ ID NO: 48671 - protein, 14 aa, Homo sapiens
NTSTDGSLPSTPPP

SEQ ID NO: 48672 - protein, 14 aa, Homo sapiens
TSTDGSLPSTPPPA

SEQ ID NO: 48673 - protein, 14 aa, Homo sapiens
STDGSLPSTPPPAE

SEQ ID NO: 48674 - protein, 14 aa, Homo sapiens
TDGSLPSTPPPAEE

SEQ ID NO: 48675 - protein, 14 aa, Homo sapiens
DGSLPSTPPPAEEE

SEQ ID NO: 48676 - protein, 14 aa, Homo sapiens
GSLPSTPPPAEEEE

SEQ ID NO: 48677 - protein, 14 aa, Homo sapiens
SLPSTPPPAEEEED

SEQ ID NO: 48678 - protein, 14 aa, Homo sapiens
LPSTPPPAEEEEDD

SEQ ID NO: 48679 - protein, 14 aa, Homo sapiens
PSTPPPAEEEEDDL

SEQ ID NO: 48680 - protein, 14 aa, Homo sapiens
STPPPAEEEEDDLY

SEQ ID NO: 48681 - protein, 14 aa, Homo sapiens
TPPPAEEEEDDLYR

SEQ ID NO: 48682 - protein, 14 aa, Homo sapiens
PPPAEEEEDDLYRQ

SEQ ID NO: 48683 - protein, 14 aa, Homo sapiens
PPAEEEEDDLYRQS

SEQ ID NO: 48684 - protein, 14 aa, Homo sapiens
PAEEEEDDLYRQSL

SEQ ID NO: 48685 - protein, 14 aa, Homo sapiens
AEEEEDDLYRQSLE

SEQ ID NO: 48686 - protein, 14 aa, Homo sapiens
EEEEDDLYRQSLEI

SEQ ID NO: 48687 - protein, 14 aa, Homo sapiens
EEEDDLYRQSLEII

SEQ ID NO: 48688 - protein, 14 aa, Homo sapiens
EEDDLYRQSLEIIS

SEQ ID NO: 48689 - protein, 14 aa, Homo sapiens
EDDLYRQSLEIISR

SEQ ID NO: 48690 - protein, 14 aa, Homo sapiens
DDLYRQSLEIISRY

SEQ ID NO: 48691 - protein, 14 aa, Homo sapiens
DLYRQSLEIISRYL

SEQ ID NO: 48692 - protein, 14 aa, Homo sapiens
LYRQSLEIISRYLR

SEQ ID NO: 48693 - protein, 14 aa, Homo sapiens
YRQSLEIISRYLRE

SEQ ID NO: 48694 - protein, 14 aa, Homo sapiens
RQSLEIISRYLREQ

SEQ ID NO: 48695 - protein, 14 aa, Homo sapiens
QSLEIISRYLREQA

SEQ ID NO: 48696 - protein, 14 aa, Homo sapiens
SLEIISRYLREQAT

SEQ ID NO: 48697 - protein, 14 aa, Homo sapiens
LEIISRYLREQATG

SEQ ID NO: 48698 - protein, 14 aa, Homo sapiens
EIISRYLREQATGA

SEQ ID NO: 48699 - protein, 14 aa, Homo sapiens
IISRYLREQATGAK

SEQ ID NO: 48700 - protein, 14 aa, Homo sapiens
ISRYLREQATGAKD

SEQ ID NO: 48701 - protein, 14 aa, Homo sapiens
SRYLREQATGAKDT

SEQ ID NO: 48702 - protein, 14 aa, Homo sapiens
RYLREQATGAKDTK

SEQ ID NO: 48703 - protein, 14 aa, Homo sapiens
YLREQATGAKDTKP

SEQ ID NO: 48704 - protein, 14 aa, Homo sapiens
LREQATGAKDTKPM

SEQ ID NO: 48705 - protein, 14 aa, Homo sapiens
REQATGAKDTKPMG

SEQ ID NO: 48706 - protein, 14 aa, Homo sapiens
EQATGAKDTKPMGR

SEQ ID NO: 48707 - protein, 14 aa, Homo sapiens
QATGAKDTKPMGRS

SEQ ID NO: 48708 - protein, 14 aa, Homo sapiens
ATGAKDTKPMGRSG

SEQ ID NO: 48709 - protein, 14 aa, Homo sapiens
TGAKDTKPMGRSGA

SEQ ID NO: 48710 - protein, 14 aa, Homo sapiens
GAKDTKPMGRSGAT

SEQ ID NO: 48711 - protein, 14 aa, Homo sapiens
AKDTKPMGRSGATS

SEQ ID NO: 48712 - protein, 14 aa, Homo sapiens
KDTKPMGRSGATSR

SEQ ID NO: 48713 - protein, 14 aa, Homo sapiens
DTKPMGRSGATSRK

SEQ ID NO: 48714 - protein, 14 aa, Homo sapiens
TKPMGRSGATSRKA

SEQ ID NO: 48715 - protein, 14 aa, Homo sapiens
KPMGRSGATSRKAL

SEQ ID NO: 48716 - protein, 14 aa, Homo sapiens
PMGRSGATSRKALE

SEQ ID NO: 48717 - protein, 14 aa, Homo sapiens
MGRSGATSRKALET

SEQ ID NO: 48718 - protein, 14 aa, Homo sapiens
GRSGATSRKALETL

SEQ ID NO: 48719 - protein, 14 aa, Homo sapiens
RSGATSRKALETLR

SEQ ID NO: 48720 - protein, 14 aa, Homo sapiens
SGATSRKALETLRR

SEQ ID NO: 48721 - protein, 14 aa, Homo sapiens
GATSRKALETLRRV

SEQ ID NO: 48722 - protein, 14 aa, Homo sapiens
ATSRKALETLRRVG

SEQ ID NO: 48723 - protein, 14 aa, Homo sapiens
TSRKALETLRRVGD

SEQ ID NO: 48724 - protein, 14 aa, Homo sapiens
SRKALETLRRVGDG

SEQ ID NO: 48725 - protein, 14 aa, Homo sapiens
RKALETLRRVGDGV

SEQ ID NO: 48726 - protein, 14 aa, Homo sapiens
KALETLRRVGDGVQ

SEQ ID NO: 48727 - protein, 14 aa, Homo sapiens
ALETLRRVGDGVQR

SEQ ID NO: 48728 - protein, 14 aa, Homo sapiens
LETLRRVGDGVQRN

SEQ ID NO: 48729 - protein, 14 aa, Homo sapiens
ETLRRVGDGVQRNH

SEQ ID NO: 48730 - protein, 14 aa, Homo sapiens
TLRRVGDGVQRNHE

SEQ ID NO: 48731 - protein, 14 aa, Homo sapiens
LRRVGDGVQRNHET

SEQ ID NO: 48732 - protein, 14 aa, Homo sapiens
RRVGDGVQRNHETA

SEQ ID NO: 48733 - protein, 14 aa, Homo sapiens
RVGDGVQRNHETAF

SEQ ID NO: 48734 - protein, 14 aa, Homo sapiens
VGDGVQRNHETAFQ

SEQ ID NO: 48735 - protein, 14 aa, Homo sapiens
GDGVQRNHETAFQG

SEQ ID NO: 48736 - protein, 14 aa, Homo sapiens
DGVQRNHETAFQGM

SEQ ID NO: 48737 - protein, 14 aa, Homo sapiens
GVQRNHETAFQGML

SEQ ID NO: 48738 - protein, 14 aa, Homo sapiens
VQRNHETAFQGMLR

SEQ ID NO: 48739 - protein, 14 aa, Homo sapiens
QRNHETAFQGMLRK

SEQ ID NO: 48740 - protein, 14 aa, Homo sapiens
RNHETAFQGMLRKL

SEQ ID NO: 48741 - protein, 14 aa, Homo sapiens
NHETAFQGMLRKLD

SEQ ID NO: 48742 - protein, 14 aa, Homo sapiens
HETAFQGMLRKLDI

SEQ ID NO: 48743 - protein, 14 aa, Homo sapiens
ETAFQGMLRKLDIK

SEQ ID NO: 48744 - protein, 14 aa, Homo sapiens
TAFQGMLRKLDIKN

SEQ ID NO: 48745 - protein, 14 aa, Homo sapiens
AFQGMLRKLDIKNE

SEQ ID NO: 48746 - protein, 14 aa, Homo sapiens
FQGMLRKLDIKNED

SEQ ID NO: 48747 - protein, 14 aa, Homo sapiens
QGMLRKLDIKNEDD

SEQ ID NO: 48748 - protein, 14 aa, Homo sapiens
GMLRKLDIKNEDDV

SEQ ID NO: 48749 - protein, 14 aa, Homo sapiens
MLRKLDIKNEDDVK

SEQ ID NO: 48750 - protein, 14 aa, Homo sapiens
LRKLDIKNEDDVKS

SEQ ID NO: 48751 - protein, 14 aa, Homo sapiens
RKLDIKNEDDVKSL

SEQ ID NO: 48752 - protein, 14 aa, Homo sapiens
KLDIKNEDDVKSLS

SEQ ID NO: 48753 - protein, 14 aa, Homo sapiens
LDIKNEDDVKSLSR

SEQ ID NO: 48754 - protein, 14 aa, Homo sapiens
DIKNEDDVKSLSRV

SEQ ID NO: 48755 - protein, 14 aa, Homo sapiens
IKNEDDVKSLSRVM

SEQ ID NO: 48756 - protein, 14 aa, Homo sapiens
KNEDDVKSLSRVMI

SEQ ID NO: 48757 - protein, 14 aa, Homo sapiens
NEDDVKSLSRVMIH

SEQ ID NO: 48758 - protein, 14 aa, Homo sapiens
EDDVKSLSRVMIHV

SEQ ID NO: 48759 - protein, 14 aa, Homo sapiens
DDVKSLSRVMIHVF

SEQ ID NO: 48760 - protein, 14 aa, Homo sapiens
DVKSLSRVMIHVFS

SEQ ID NO: 48761 - protein, 14 aa, Homo sapiens
VKSLSRVMIHVFSD

SEQ ID NO: 48762 - protein, 14 aa, Homo sapiens
KSLSRVMIHVFSDG

SEQ ID NO: 48763 - protein, 14 aa, Homo sapiens
SLSRVMIHVFSDGV

SEQ ID NO: 48764 - protein, 14 aa, Homo sapiens
LSRVMIHVFSDGVT

SEQ ID NO: 48765 - protein, 14 aa, Homo sapiens
SRVMIHVFSDGVTN

SEQ ID NO: 48766 - protein, 14 aa, Homo sapiens
RVMIHVFSDGVTNW

SEQ ID NO: 48767 - protein, 14 aa, Homo sapiens
VMIHVFSDGVTNWG

SEQ ID NO: 48768 - protein, 14 aa, Homo sapiens
MIHVFSDGVTNWGR

SEQ ID NO: 48769 - protein, 14 aa, Homo sapiens
IHVFSDGVTNWGRI

SEQ ID NO: 48770 - protein, 14 aa, Homo sapiens
HVFSDGVTNWGRIV

SEQ ID NO: 48771 - protein, 14 aa, Homo sapiens
VFSDGVTNWGRIVT

SEQ ID NO: 48772 - protein, 14 aa, Homo sapiens
FSDGVTNWGRIVTL

SEQ ID NO: 48773 - protein, 14 aa, Homo sapiens
SDGVTNWGRIVTLI

SEQ ID NO: 48774 - protein, 14 aa, Homo sapiens
DGVTNWGRIVTLIS

SEQ ID NO: 48775 - protein, 14 aa, Homo sapiens
GVTNWGRIVTLISF

SEQ ID NO: 48776 - protein, 14 aa, Homo sapiens
VTNWGRIVTLISFG

SEQ ID NO: 48777 - protein, 14 aa, Homo sapiens
TNWGRIVTLISFGA

SEQ ID NO: 48778 - protein, 14 aa, Homo sapiens
NWGRIVTLISFGAF

SEQ ID NO: 48779 - protein, 14 aa, Homo sapiens
WGRIVTLISFGAFV

SEQ ID NO: 48780 - protein, 14 aa, Homo sapiens
GRIVTLISFGAFVA

SEQ ID NO: 48781 - protein, 14 aa, Homo sapiens
RIVTLISFGAFVAK

SEQ ID NO: 48782 - protein, 14 aa, Homo sapiens
IVTLISFGAFVAKH

SEQ ID NO: 48783 - protein, 14 aa, Homo sapiens
VTLISFGAFVAKHL

SEQ ID NO: 48784 - protein, 14 aa, Homo sapiens
TLISFGAFVAKHLK

SEQ ID NO: 48785 - protein, 14 aa, Homo sapiens
LISFGAFVAKHLKT

SEQ ID NO: 48786 - protein, 14 aa, Homo sapiens
ISFGAFVAKHLKTI

SEQ ID NO: 48787 - protein, 14 aa, Homo sapiens
SFGAFVAKHLKTIN

SEQ ID NO: 48788 - protein, 14 aa, Homo sapiens
FGAFVAKHLKTINQ

SEQ ID NO: 48789 - protein, 14 aa, Homo sapiens
GAFVAKHLKTINQE

SEQ ID NO: 48790 - protein, 14 aa, Homo sapiens
AFVAKHLKTINQES

SEQ ID NO: 48791 - protein, 14 aa, Homo sapiens
FVAKHLKTINQESC

SEQ ID NO: 48792 - protein, 14 aa, Homo sapiens
VAKHLKTINQESCI

SEQ ID NO: 48793 - protein, 14 aa, Homo sapiens
AKHLKTINQESCIE

SEQ ID NO: 48794 - protein, 14 aa, Homo sapiens
KHLKTINQESCIEP

SEQ ID NO: 48795 - protein, 14 aa, Homo sapiens
HLKTINQESCIEPL

SEQ ID NO: 48796 - protein, 14 aa, Homo sapiens
LKTINQESCIEPLA

SEQ ID NO: 48797 - protein, 14 aa, Homo sapiens
KTINQESCIEPLAE

SEQ ID NO: 48798 - protein, 14 aa, Homo sapiens
TINQESCIEPLAES

SEQ ID NO: 48799 - protein, 14 aa, Homo sapiens
INQESCIEPLAESI

SEQ ID NO: 48800 - protein, 14 aa, Homo sapiens
NQESCIEPLAESIT

SEQ ID NO: 48801 - protein, 14 aa, Homo sapiens
QESCIEPLAESITD

SEQ ID NO: 48802 - protein, 14 aa, Homo sapiens
ESCIEPLAESITDV

SEQ ID NO: 48803 - protein, 14 aa, Homo sapiens
SCIEPLAESITDVL

SEQ ID NO: 48804 - protein, 14 aa, Homo sapiens
CIEPLAESITDVLV

SEQ ID NO: 48805 - protein, 14 aa, Homo sapiens
IEPLAESITDVLVR

SEQ ID NO: 48806 - protein, 14 aa, Homo sapiens
EPLAESITDVLVRT

SEQ ID NO: 48807 - protein, 14 aa, Homo sapiens
PLAESITDVLVRTK

SEQ ID NO: 48808 - protein, 14 aa, Homo sapiens
LAESITDVLVRTKR

SEQ ID NO: 48809 - protein, 14 aa, Homo sapiens
AESITDVLVRTKRD

SEQ ID NO: 48810 - protein, 14 aa, Homo sapiens
ESITDVLVRTKRDW

SEQ ID NO: 48811 - protein, 14 aa, Homo sapiens
SITDVLVRTKRDWL

SEQ ID NO: 48812 - protein, 14 aa, Homo sapiens
ITDVLVRTKRDWLV

SEQ ID NO: 48813 - protein, 14 aa, Homo sapiens
TDVLVRTKRDWLVK

SEQ ID NO: 48814 - protein, 14 aa, Homo sapiens
DVLVRTKRDWLVKQ

SEQ ID NO: 48815 - protein, 14 aa, Homo sapiens
VLVRTKRDWLVKQR

SEQ ID NO: 48816 - protein, 14 aa, Homo sapiens
LVRTKRDWLVKQRG

SEQ ID NO: 48817 - protein, 14 aa, Homo sapiens
VRTKRDWLVKQRGW

SEQ ID NO: 48818 - protein, 14 aa, Homo sapiens
RTKRDWLVKQRGWD

SEQ ID NO: 48819 - protein, 14 aa, Homo sapiens
TKRDWLVKQRGWDG

SEQ ID NO: 48820 - protein, 14 aa, Homo sapiens
KRDWLVKQRGWDGF

SEQ ID NO: 48821 - protein, 14 aa, Homo sapiens
RDWLVKQRGWDGFV

SEQ ID NO: 48822 - protein, 14 aa, Homo sapiens
DWLVKQRGWDGFVE

SEQ ID NO: 48823 - protein, 14 aa, Homo sapiens
WLVKQRGWDGFVEF

SEQ ID NO: 48824 - protein, 14 aa, Homo sapiens
LVKQRGWDGFVEFF

SEQ ID NO: 48825 - protein, 14 aa, Homo sapiens
VKQRGWDGFVEFFH

SEQ ID NO: 48826 - protein, 14 aa, Homo sapiens
KQRGWDGFVEFFHV

SEQ ID NO: 48827 - protein, 14 aa, Homo sapiens
QRGWDGFVEFFHVE

SEQ ID NO: 48828 - protein, 14 aa, Homo sapiens
RGWDGFVEFFHVED

SEQ ID NO: 48829 - protein, 14 aa, Homo sapiens
GWDGFVEFFHVEDL

SEQ ID NO: 48830 - protein, 14 aa, Homo sapiens
WDGFVEFFHVEDLE

SEQ ID NO: 48831 - protein, 14 aa, Homo sapiens
DGFVEFFHVEDLEG

SEQ ID NO: 48832 - protein, 14 aa, Homo sapiens
GFVEFFHVEDLEGG

SEQ ID NO: 48833 - protein, 14 aa, Homo sapiens
FVEFFHVEDLEGGI

SEQ ID NO: 48834 - protein, 14 aa, Homo sapiens
VEFFHVEDLEGGIR

SEQ ID NO: 48835 - protein, 14 aa, Homo sapiens
EFFHVEDLEGGIRN

SEQ ID NO: 48836 - protein, 14 aa, Homo sapiens
FFHVEDLEGGIRNV

SEQ ID NO: 48837 - protein, 14 aa, Homo sapiens
FHVEDLEGGIRNVL

SEQ ID NO: 48838 - protein, 14 aa, Homo sapiens
HVEDLEGGIRNVLL

SEQ ID NO: 48839 - protein, 14 aa, Homo sapiens
VEDLEGGIRNVLLA

SEQ ID NO: 48840 - protein, 14 aa, Homo sapiens
EDLEGGIRNVLLAF

SEQ ID NO: 48841 - protein, 14 aa, Homo sapiens
DLEGGIRNVLLAFA

SEQ ID NO: 48842 - protein, 14 aa, Homo sapiens
LEGGIRNVLLAFAG

SEQ ID NO: 48843 - protein, 14 aa, Homo sapiens
EGGIRNVLLAFAGV

SEQ ID NO: 48844 - protein, 14 aa, Homo sapiens
GGIRNVLLAFAGVA

SEQ ID NO: 48845 - protein, 14 aa, Homo sapiens
GIRNVLLAFAGVAG

SEQ ID NO: 48846 - protein, 14 aa, Homo sapiens
IRNVLLAFAGVAGV

SEQ ID NO: 48847 - protein, 14 aa, Homo sapiens
RNVLLAFAGVAGVG

SEQ ID NO: 48848 - protein, 14 aa, Homo sapiens
NVLLAFAGVAGVGA

SEQ ID NO: 48849 - protein, 14 aa, Homo sapiens
VLLAFAGVAGVGAG

SEQ ID NO: 48850 - protein, 14 aa, Homo sapiens
LLAFAGVAGVGAGL

SEQ ID NO: 48851 - protein, 14 aa, Homo sapiens
LAFAGVAGVGAGLA

SEQ ID NO: 48852 - protein, 14 aa, Homo sapiens
AFAGVAGVGAGLAY

SEQ ID NO: 48853 - protein, 14 aa, Homo sapiens
FAGVAGVGAGLAYL

SEQ ID NO: 48854 - protein, 14 aa, Homo sapiens
AGVAGVGAGLAYLI

SEQ ID NO: 48855 - protein, 14 aa, Homo sapiens
GVAGVGAGLAYLIR

SEQ ID NO: 48856 - protein, 15 aa, Homo sapiens
MFGLKRNAVIGLNLY

SEQ ID NO: 48857 - protein, 15 aa, Homo sapiens
FGLKRNAVIGLNLYC

SEQ ID NO: 48858 - protein, 15 aa, Homo sapiens
GLKRNAVIGLNLYCG

SEQ ID NO: 48859 - protein, 15 aa, Homo sapiens
LKRNAVIGLNLYCGG

SEQ ID NO: 48860 - protein, 15 aa, Homo sapiens
KRNAVIGLNLYCGGA

SEQ ID NO: 48861 - protein, 15 aa, Homo sapiens
RNAVIGLNLYCGGAG

SEQ ID NO: 48862 - protein, 15 aa, Homo sapiens
NAVIGLNLYCGGAGL

SEQ ID NO: 48863 - protein, 15 aa, Homo sapiens
AVIGLNLYCGGAGLG

SEQ ID NO: 48864 - protein, 15 aa, Homo sapiens
VIGLNLYCGGAGLGA

SEQ ID NO: 48865 - protein, 15 aa, Homo sapiens
IGLNLYCGGAGLGAG

SEQ ID NO: 48866 - protein, 15 aa, Homo sapiens
GLNLYCGGAGLGAGS

SEQ ID NO: 48867 - protein, 15 aa, Homo sapiens
LNLYCGGAGLGAGSG

SEQ ID NO: 48868 - protein, 15 aa, Homo sapiens
NLYCGGAGLGAGSGG

SEQ ID NO: 48869 - protein, 15 aa, Homo sapiens
LYCGGAGLGAGSGGA

SEQ ID NO: 48870 - protein, 15 aa, Homo sapiens
YCGGAGLGAGSGGAT

SEQ ID NO: 48871 - protein, 15 aa, Homo sapiens
CGGAGLGAGSGGATR

SEQ ID NO: 48872 - protein, 15 aa, Homo sapiens
GGAGLGAGSGGATRP

SEQ ID NO: 48873 - protein, 15 aa, Homo sapiens
GAGLGAGSGGATRPG

SEQ ID NO: 48874 - protein, 15 aa, Homo sapiens
AGLGAGSGGATRPGG

SEQ ID NO: 48875 - protein, 15 aa, Homo sapiens
GLGAGSGGATRPGGR

SEQ ID NO: 48876 - protein, 15 aa, Homo sapiens
LGAGSGGATRPGGRL

SEQ ID NO: 48877 - protein, 15 aa, Homo sapiens
GAGSGGATRPGGRLL

SEQ ID NO: 48878 - protein, 15 aa, Homo sapiens
AGSGGATRPGGRLLA

SEQ ID NO: 48879 - protein, 15 aa, Homo sapiens
GSGGATRPGGRLLAT

SEQ ID NO: 48880 - protein, 15 aa, Homo sapiens
SGGATRPGGRLLATE

SEQ ID NO: 48881 - protein, 15 aa, Homo sapiens
GGATRPGGRLLATEK

SEQ ID NO: 48882 - protein, 15 aa, Homo sapiens
GATRPGGRLLATEKE

SEQ ID NO: 48883 - protein, 15 aa, Homo sapiens
ATRPGGRLLATEKEA

SEQ ID NO: 48884 - protein, 15 aa, Homo sapiens
TRPGGRLLATEKEAS

SEQ ID NO: 48885 - protein, 15 aa, Homo sapiens
RPGGRLLATEKEASA

SEQ ID NO: 48886 - protein, 15 aa, Homo sapiens
PGGRLLATEKEASAR

SEQ ID NO: 48887 - protein, 15 aa, Homo sapiens
GGRLLATEKEASARR

SEQ ID NO: 48888 - protein, 15 aa, Homo sapiens
GRLLATEKEASARRE

SEQ ID NO: 48889 - protein, 15 aa, Homo sapiens
RLLATEKEASARREI

SEQ ID NO: 48890 - protein, 15 aa, Homo sapiens
LLATEKEASARREIG

SEQ ID NO: 48891 - protein, 15 aa, Homo sapiens
LATEKEASARREIGG

SEQ ID NO: 48892 - protein, 15 aa, Homo sapiens
ATEKEASARREIGGG

SEQ ID NO: 48893 - protein, 15 aa, Homo sapiens
TEKEASARREIGGGE

SEQ ID NO: 48894 - protein, 15 aa, Homo sapiens
EKEASARREIGGGEA

SEQ ID NO: 48895 - protein, 15 aa, Homo sapiens
KEASARREIGGGEAG

SEQ ID NO: 48896 - protein, 15 aa, Homo sapiens
EASARREIGGGEAGA

SEQ ID NO: 48897 - protein, 15 aa, Homo sapiens
ASARREIGGGEAGAV

SEQ ID NO: 48898 - protein, 15 aa, Homo sapiens
SARREIGGGEAGAVI

SEQ ID NO: 48899 - protein, 15 aa, Homo sapiens
ARREIGGGEAGAVIG

SEQ ID NO: 48900 - protein, 15 aa, Homo sapiens
RREIGGGEAGAVIGG

SEQ ID NO: 48901 - protein, 15 aa, Homo sapiens
REIGGGEAGAVIGGS

SEQ ID NO: 48902 - protein, 15 aa, Homo sapiens
EIGGGEAGAVIGGSA

SEQ ID NO: 48903 - protein, 15 aa, Homo sapiens
IGGGEAGAVIGGSAG

SEQ ID NO: 48904 - protein, 15 aa, Homo sapiens
GGGEAGAVIGGSAGA

SEQ ID NO: 48905 - protein, 15 aa, Homo sapiens
GGEAGAVIGGSAGAS

SEQ ID NO: 48906 - protein, 15 aa, Homo sapiens
GEAGAVIGGSAGASP

SEQ ID NO: 48907 - protein, 15 aa, Homo sapiens
EAGAVIGGSAGASPP

SEQ ID NO: 48908 - protein, 15 aa, Homo sapiens
AGAVIGGSAGASPPS

SEQ ID NO: 48909 - protein, 15 aa, Homo sapiens
GAVIGGSAGASPPST

SEQ ID NO: 48910 - protein, 15 aa, Homo sapiens
AVIGGSAGASPPSTL

SEQ ID NO: 48911 - protein, 15 aa, Homo sapiens
VIGGSAGASPPSTLT

SEQ ID NO: 48912 - protein, 15 aa, Homo sapiens
IGGSAGASPPSTLTP

SEQ ID NO: 48913 - protein, 15 aa, Homo sapiens
GGSAGASPPSTLTPD

SEQ ID NO: 48914 - protein, 15 aa, Homo sapiens
GSAGASPPSTLTPDS

SEQ ID NO: 48915 - protein, 15 aa, Homo sapiens
SAGASPPSTLTPDSR

SEQ ID NO: 48916 - protein, 15 aa, Homo sapiens
AGASPPSTLTPDSRR

SEQ ID NO: 48917 - protein, 15 aa, Homo sapiens
GASPPSTLTPDSRRV

SEQ ID NO: 48918 - protein, 15 aa, Homo sapiens
ASPPSTLTPDSRRVA

SEQ ID NO: 48919 - protein, 15 aa, Homo sapiens
SPPSTLTPDSRRVAR

SEQ ID NO: 48920 - protein, 15 aa, Homo sapiens
PPSTLTPDSRRVARP

SEQ ID NO: 48921 - protein, 15 aa, Homo sapiens
PSTLTPDSRRVARPP

SEQ ID NO: 48922 - protein, 15 aa, Homo sapiens
STLTPDSRRVARPPP

SEQ ID NO: 48923 - protein, 15 aa, Homo sapiens
TLTPDSRRVARPPPI

SEQ ID NO: 48924 - protein, 15 aa, Homo sapiens
LTPDSRRVARPPPIG

SEQ ID NO: 48925 - protein, 15 aa, Homo sapiens
TPDSRRVARPPPIGA

SEQ ID NO: 48926 - protein, 15 aa, Homo sapiens
PDSRRVARPPPIGAE

SEQ ID NO: 48927 - protein, 15 aa, Homo sapiens
DSRRVARPPPIGAEV

SEQ ID NO: 48928 - protein, 15 aa, Homo sapiens
SRRVARPPPIGAEVP

SEQ ID NO: 48929 - protein, 15 aa, Homo sapiens
RRVARPPPIGAEVPD

SEQ ID NO: 48930 - protein, 15 aa, Homo sapiens
RVARPPPIGAEVPDV

SEQ ID NO: 48931 - protein, 15 aa, Homo sapiens
VARPPPIGAEVPDVT

SEQ ID NO: 48932 - protein, 15 aa, Homo sapiens
ARPPPIGAEVPDVTA

SEQ ID NO: 48933 - protein, 15 aa, Homo sapiens
RPPPIGAEVPDVTAT

SEQ ID NO: 48934 - protein, 15 aa, Homo sapiens
PPPIGAEVPDVTATP

SEQ ID NO: 48935 - protein, 15 aa, Homo sapiens
PPIGAEVPDVTATPA

SEQ ID NO: 48936 - protein, 15 aa, Homo sapiens
PIGAEVPDVTATPAR

SEQ ID NO: 48937 - protein, 15 aa, Homo sapiens
IGAEVPDVTATPARL

SEQ ID NO: 48938 - protein, 15 aa, Homo sapiens
GAEVPDVTATPARLL

SEQ ID NO: 48939 - protein, 15 aa, Homo sapiens
AEVPDVTATPARLLF

SEQ ID NO: 48940 - protein, 15 aa, Homo sapiens
EVPDVTATPARLLFF

SEQ ID NO: 48941 - protein, 15 aa, Homo sapiens
VPDVTATPARLLFFA

SEQ ID NO: 48942 - protein, 15 aa, Homo sapiens
PDVTATPARLLFFAP

SEQ ID NO: 48943 - protein, 15 aa, Homo sapiens
DVTATPARLLFFAPT

SEQ ID NO: 48944 - protein, 15 aa, Homo sapiens
VTATPARLLFFAPTR

SEQ ID NO: 48945 - protein, 15 aa, Homo sapiens
TATPARLLFFAPTRR

SEQ ID NO: 48946 - protein, 15 aa, Homo sapiens
ATPARLLFFAPTRRA

SEQ ID NO: 48947 - protein, 15 aa, Homo sapiens
TPARLLFFAPTRRAA

SEQ ID NO: 48948 - protein, 15 aa, Homo sapiens
PARLLFFAPTRRAAP

SEQ ID NO: 48949 - protein, 15 aa, Homo sapiens
ARLLFFAPTRRAAPL

SEQ ID NO: 48950 - protein, 15 aa, Homo sapiens
RLLFFAPTRRAAPLE

SEQ ID NO: 48951 - protein, 15 aa, Homo sapiens
LLFFAPTRRAAPLEE

SEQ ID NO: 48952 - protein, 15 aa, Homo sapiens
LFFAPTRRAAPLEEM

SEQ ID NO: 48953 - protein, 15 aa, Homo sapiens
FFAPTRRAAPLEEME

SEQ ID NO: 48954 - protein, 15 aa, Homo sapiens
FAPTRRAAPLEEMEA

SEQ ID NO: 48955 - protein, 15 aa, Homo sapiens
APTRRAAPLEEMEAP

SEQ ID NO: 48956 - protein, 15 aa, Homo sapiens
PTRRAAPLEEMEAPA

SEQ ID NO: 48957 - protein, 15 aa, Homo sapiens
TRRAAPLEEMEAPAA

SEQ ID NO: 48958 - protein, 15 aa, Homo sapiens
RRAAPLEEMEAPAAD

SEQ ID NO: 48959 - protein, 15 aa, Homo sapiens
RAAPLEEMEAPAADA

SEQ ID NO: 48960 - protein, 15 aa, Homo sapiens
AAPLEEMEAPAADAI

SEQ ID NO: 48961 - protein, 15 aa, Homo sapiens
APLEEMEAPAADAIM

SEQ ID NO: 48962 - protein, 15 aa, Homo sapiens
PLEEMEAPAADAIMS

SEQ ID NO: 48963 - protein, 15 aa, Homo sapiens
LEEMEAPAADAIMSP

SEQ ID NO: 48964 - protein, 15 aa, Homo sapiens
EEMEAPAADAIMSPE

SEQ ID NO: 48965 - protein, 15 aa, Homo sapiens
EMEAPAADAIMSPEE

SEQ ID NO: 48966 - protein, 15 aa, Homo sapiens
MEAPAADAIMSPEEE

SEQ ID NO: 48967 - protein, 15 aa, Homo sapiens
EAPAADAIMSPEEEL

SEQ ID NO: 48968 - protein, 15 aa, Homo sapiens
APAADAIMSPEEELD

SEQ ID NO: 48969 - protein, 15 aa, Homo sapiens
PAADAIMSPEEELDG

SEQ ID NO: 48970 - protein, 15 aa, Homo sapiens
AADAIMSPEEELDGY

SEQ ID NO: 48971 - protein, 15 aa, Homo sapiens
ADAIMSPEEELDGYE

SEQ ID NO: 48972 - protein, 15 aa, Homo sapiens
DAIMSPEEELDGYEP

SEQ ID NO: 48973 - protein, 15 aa, Homo sapiens
AIMSPEEELDGYEPE

SEQ ID NO: 48974 - protein, 15 aa, Homo sapiens
IMSPEEELDGYEPEP

SEQ ID NO: 48975 - protein, 15 aa, Homo sapiens
MSPEEELDGYEPEPL

SEQ ID NO: 48976 - protein, 15 aa, Homo sapiens
SPEEELDGYEPEPLG

SEQ ID NO: 48977 - protein, 15 aa, Homo sapiens
PEEELDGYEPEPLGK

SEQ ID NO: 48978 - protein, 15 aa, Homo sapiens
EEELDGYEPEPLGKR

SEQ ID NO: 48979 - protein, 15 aa, Homo sapiens
EELDGYEPEPLGKRP

SEQ ID NO: 48980 - protein, 15 aa, Homo sapiens
ELDGYEPEPLGKRPA

SEQ ID NO: 48981 - protein, 15 aa, Homo sapiens
LDGYEPEPLGKRPAV

SEQ ID NO: 48982 - protein, 15 aa, Homo sapiens
DGYEPEPLGKRPAVL

SEQ ID NO: 48983 - protein, 15 aa, Homo sapiens
GYEPEPLGKRPAVLP

SEQ ID NO: 48984 - protein, 15 aa, Homo sapiens
YEPEPLGKRPAVLPL

SEQ ID NO: 48985 - protein, 15 aa, Homo sapiens
EPEPLGKRPAVLPLL

SEQ ID NO: 48986 - protein, 15 aa, Homo sapiens
PEPLGKRPAVLPLLE

SEQ ID NO: 48987 - protein, 15 aa, Homo sapiens
EPLGKRPAVLPLLEL

SEQ ID NO: 48988 - protein, 15 aa, Homo sapiens
PLGKRPAVLPLLELV

SEQ ID NO: 48989 - protein, 15 aa, Homo sapiens
LGKRPAVLPLLELVG

SEQ ID NO: 48990 - protein, 15 aa, Homo sapiens
GKRPAVLPLLELVGE

SEQ ID NO: 48991 - protein, 15 aa, Homo sapiens
KRPAVLPLLELVGES

SEQ ID NO: 48992 - protein, 15 aa, Homo sapiens
RPAVLPLLELVGESG

SEQ ID NO: 48993 - protein, 15 aa, Homo sapiens
PAVLPLLELVGESGN

SEQ ID NO: 48994 - protein, 15 aa, Homo sapiens
AVLPLLELVGESGNN

SEQ ID NO: 48995 - protein, 15 aa, Homo sapiens
VLPLLELVGESGNNT

SEQ ID NO: 48996 - protein, 15 aa, Homo sapiens
LPLLELVGESGNNTS

SEQ ID NO: 48997 - protein, 15 aa, Homo sapiens
PLLELVGESGNNTST

SEQ ID NO: 48998 - protein, 15 aa, Homo sapiens
LLELVGESGNNTSTD

SEQ ID NO: 48999 - protein, 15 aa, Homo sapiens
LELVGESGNNTSTDG

SEQ ID NO: 49000 - protein, 15 aa, Homo sapiens
ELVGESGNNTSTDGS

SEQ ID NO: 49001 - protein, 15 aa, Homo sapiens
LVGESGNNTSTDGSL

SEQ ID NO: 49002 - protein, 15 aa, Homo sapiens
VGESGNNTSTDGSLP

SEQ ID NO: 49003 - protein, 15 aa, Homo sapiens
GESGNNTSTDGSLPS

SEQ ID NO: 49004 - protein, 15 aa, Homo sapiens
ESGNNTSTDGSLPST

SEQ ID NO: 49005 - protein, 15 aa, Homo sapiens
SGNNTSTDGSLPSTP

SEQ ID NO: 49006 - protein, 15 aa, Homo sapiens
GNNTSTDGSLPSTPP

SEQ ID NO: 49007 - protein, 15 aa, Homo sapiens
NNTSTDGSLPSTPPP

SEQ ID NO: 49008 - protein, 15 aa, Homo sapiens
NTSTDGSLPSTPPPA

SEQ ID NO: 49009 - protein, 15 aa, Homo sapiens
TSTDGSLPSTPPPAE

SEQ ID NO: 49010 - protein, 15 aa, Homo sapiens
STDGSLPSTPPPAEE

SEQ ID NO: 49011 - protein, 15 aa, Homo sapiens
TDGSLPSTPPPAEEE

SEQ ID NO: 49012 - protein, 15 aa, Homo sapiens
DGSLPSTPPPAEEEE

SEQ ID NO: 49013 - protein, 15 aa, Homo sapiens
GSLPSTPPPAEEEED

SEQ ID NO: 49014 - protein, 15 aa, Homo sapiens
SLPSTPPPAEEEEDD

SEQ ID NO: 49015 - protein, 15 aa, Homo sapiens
LPSTPPPAEEEEDDL

SEQ ID NO: 49016 - protein, 15 aa, Homo sapiens
PSTPPPAEEEEDDLY

SEQ ID NO: 49017 - protein, 15 aa, Homo sapiens
STPPPAEEEEDDLYR

SEQ ID NO: 49018 - protein, 15 aa, Homo sapiens
TPPPAEEEEDDLYRQ

SEQ ID NO: 49019 - protein, 15 aa, Homo sapiens
PPPAEEEEDDLYRQS

SEQ ID NO: 49020 - protein, 15 aa, Homo sapiens
PPAEEEEDDLYRQSL

SEQ ID NO: 49021 - protein, 15 aa, Homo sapiens
PAEEEEDDLYRQSLE

SEQ ID NO: 49022 - protein, 15 aa, Homo sapiens
AEEEEDDLYRQSLEI

SEQ ID NO: 49023 - protein, 15 aa, Homo sapiens
EEEEDDLYRQSLEII

SEQ ID NO: 49024 - protein, 15 aa, Homo sapiens
EEEDDLYRQSLEIIS

SEQ ID NO: 49025 - protein, 15 aa, Homo sapiens
EEDDLYRQSLEIISR

SEQ ID NO: 49026 - protein, 15 aa, Homo sapiens
EDDLYRQSLEIISRY

SEQ ID NO: 49027 - protein, 15 aa, Homo sapiens
DDLYRQSLEIISRYL

SEQ ID NO: 49028 - protein, 15 aa, Homo sapiens
DLYRQSLEIISRYLR

SEQ ID NO: 49029 - protein, 15 aa, Homo sapiens
LYRQSLEIISRYLRE

SEQ ID NO: 49030 - protein, 15 aa, Homo sapiens
YRQSLEIISRYLREQ

SEQ ID NO: 49031 - protein, 15 aa, Homo sapiens
RQSLEIISRYLREQA

SEQ ID NO: 49032 - protein, 15 aa, Homo sapiens
QSLEIISRYLREQAT

SEQ ID NO: 49033 - protein, 15 aa, Homo sapiens
SLEIISRYLREQATG

SEQ ID NO: 49034 - protein, 15 aa, Homo sapiens
LEIISRYLREQATGA

SEQ ID NO: 49035 - protein, 15 aa, Homo sapiens
EIISRYLREQATGAK

SEQ ID NO: 49036 - protein, 15 aa, Homo sapiens
IISRYLREQATGAKD

SEQ ID NO: 49037 - protein, 15 aa, Homo sapiens
ISRYLREQATGAKDT

SEQ ID NO: 49038 - protein, 15 aa, Homo sapiens
SRYLREQATGAKDTK

SEQ ID NO: 49039 - protein, 15 aa, Homo sapiens
RYLREQATGAKDTKP

SEQ ID NO: 49040 - protein, 15 aa, Homo sapiens
YLREQATGAKDTKPM

SEQ ID NO: 49041 - protein, 15 aa, Homo sapiens
LREQATGAKDTKPMG

SEQ ID NO: 49042 - protein, 15 aa, Homo sapiens
REQATGAKDTKPMGR

SEQ ID NO: 49043 - protein, 15 aa, Homo sapiens
EQATGAKDTKPMGRS

SEQ ID NO: 49044 - protein, 15 aa, Homo sapiens
QATGAKDTKPMGRSG

SEQ ID NO: 49045 - protein, 15 aa, Homo sapiens
ATGAKDTKPMGRSGA

SEQ ID NO: 49046 - protein, 15 aa, Homo sapiens
TGAKDTKPMGRSGAT

SEQ ID NO: 49047 - protein, 15 aa, Homo sapiens
GAKDTKPMGRSGATS

SEQ ID NO: 49048 - protein, 15 aa, Homo sapiens
AKDTKPMGRSGATSR

SEQ ID NO: 49049 - protein, 15 aa, Homo sapiens
KDTKPMGRSGATSRK

SEQ ID NO: 49050 - protein, 15 aa, Homo sapiens
DTKPMGRSGATSRKA

SEQ ID NO: 49051 - protein, 15 aa, Homo sapiens
TKPMGRSGATSRKAL

SEQ ID NO: 49052 - protein, 15 aa, Homo sapiens
KPMGRSGATSRKALE

SEQ ID NO: 49053 - protein, 15 aa, Homo sapiens
PMGRSGATSRKALET

SEQ ID NO: 49054 - protein, 15 aa, Homo sapiens
MGRSGATSRKALETL

SEQ ID NO: 49055 - protein, 15 aa, Homo sapiens
GRSGATSRKALETLR

SEQ ID NO: 49056 - protein, 15 aa, Homo sapiens
RSGATSRKALETLRR

SEQ ID NO: 49057 - protein, 15 aa, Homo sapiens
SGATSRKALETLRRV

SEQ ID NO: 49058 - protein, 15 aa, Homo sapiens
GATSRKALETLRRVG

SEQ ID NO: 49059 - protein, 15 aa, Homo sapiens
ATSRKALETLRRVGD

SEQ ID NO: 49060 - protein, 15 aa, Homo sapiens
TSRKALETLRRVGDG

SEQ ID NO: 49061 - protein, 15 aa, Homo sapiens
SRKALETLRRVGDGV

SEQ ID NO: 49062 - protein, 15 aa, Homo sapiens
RKALETLRRVGDGVQ

SEQ ID NO: 49063 - protein, 15 aa, Homo sapiens
KALETLRRVGDGVQR

SEQ ID NO: 49064 - protein, 15 aa, Homo sapiens
ALETLRRVGDGVQRN

SEQ ID NO: 49065 - protein, 15 aa, Homo sapiens
LETLRRVGDGVQRNH

SEQ ID NO: 49066 - protein, 15 aa, Homo sapiens
ETLRRVGDGVQRNHE

SEQ ID NO: 49067 - protein, 15 aa, Homo sapiens
TLRRVGDGVQRNHET

SEQ ID NO: 49068 - protein, 15 aa, Homo sapiens
LRRVGDGVQRNHETA

SEQ ID NO: 49069 - protein, 15 aa, Homo sapiens
RRVGDGVQRNHETAF

SEQ ID NO: 49070 - protein, 15 aa, Homo sapiens
RVGDGVQRNHETAFQ

SEQ ID NO: 49071 - protein, 15 aa, Homo sapiens
VGDGVQRNHETAFQG

SEQ ID NO: 49072 - protein, 15 aa, Homo sapiens
GDGVQRNHETAFQGM

SEQ ID NO: 49073 - protein, 15 aa, Homo sapiens
DGVQRNHETAFQGML

SEQ ID NO: 49074 - protein, 15 aa, Homo sapiens
GVQRNHETAFQGMLR

SEQ ID NO: 49075 - protein, 15 aa, Homo sapiens
VQRNHETAFQGMLRK

SEQ ID NO: 49076 - protein, 15 aa, Homo sapiens
QRNHETAFQGMLRKL

SEQ ID NO: 49077 - protein, 15 aa, Homo sapiens
RNHETAFQGMLRKLD

SEQ ID NO: 49078 - protein, 15 aa, Homo sapiens
NHETAFQGMLRKLDI

SEQ ID NO: 49079 - protein, 15 aa, Homo sapiens
HETAFQGMLRKLDIK

SEQ ID NO: 49080 - protein, 15 aa, Homo sapiens
ETAFQGMLRKLDIKN

SEQ ID NO: 49081 - protein, 15 aa, Homo sapiens
TAFQGMLRKLDIKNE

SEQ ID NO: 49082 - protein, 15 aa, Homo sapiens
AFQGMLRKLDIKNED

SEQ ID NO: 49083 - protein, 15 aa, Homo sapiens
FQGMLRKLDIKNEDD

SEQ ID NO: 49084 - protein, 15 aa, Homo sapiens
QGMLRKLDIKNEDDV

SEQ ID NO: 49085 - protein, 15 aa, Homo sapiens
GMLRKLDIKNEDDVK

SEQ ID NO: 49086 - protein, 15 aa, Homo sapiens
MLRKLDIKNEDDVKS

SEQ ID NO: 49087 - protein, 15 aa, Homo sapiens
LRKLDIKNEDDVKSL

SEQ ID NO: 49088 - protein, 15 aa, Homo sapiens
RKLDIKNEDDVKSLS

SEQ ID NO: 49089 - protein, 15 aa, Homo sapiens
KLDIKNEDDVKSLSR

SEQ ID NO: 49090 - protein, 15 aa, Homo sapiens
LDIKNEDDVKSLSRV

SEQ ID NO: 49091 - protein, 15 aa, Homo sapiens
DIKNEDDVKSLSRVM

SEQ ID NO: 49092 - protein, 15 aa, Homo sapiens
IKNEDDVKSLSRVMI

SEQ ID NO: 49093 - protein, 15 aa, Homo sapiens
KNEDDVKSLSRVMIH

SEQ ID NO: 49094 - protein, 15 aa, Homo sapiens
NEDDVKSLSRVMIHV

SEQ ID NO: 49095 - protein, 15 aa, Homo sapiens
EDDVKSLSRVMIHVF

SEQ ID NO: 49096 - protein, 15 aa, Homo sapiens
DDVKSLSRVMIHVFS

SEQ ID NO: 49097 - protein, 15 aa, Homo sapiens
DVKSLSRVMIHVFSD

SEQ ID NO: 49098 - protein, 15 aa, Homo sapiens
VKSLSRVMIHVFSDG

SEQ ID NO: 49099 - protein, 15 aa, Homo sapiens
KSLSRVMIHVFSDGV

SEQ ID NO: 49100 - protein, 15 aa, Homo sapiens
SLSRVMIHVFSDGVT

SEQ ID NO: 49101 - protein, 15 aa, Homo sapiens
LSRVMIHVFSDGVTN

SEQ ID NO: 49102 - protein, 15 aa, Homo sapiens
SRVMIHVFSDGVTNW

SEQ ID NO: 49103 - protein, 15 aa, Homo sapiens
RVMIHVFSDGVTNWG

SEQ ID NO: 49104 - protein, 15 aa, Homo sapiens
VMIHVFSDGVTNWGR

SEQ ID NO: 49105 - protein, 15 aa, Homo sapiens
MIHVFSDGVTNWGRI

SEQ ID NO: 49106 - protein, 15 aa, Homo sapiens
IHVFSDGVTNWGRIV

SEQ ID NO: 49107 - protein, 15 aa, Homo sapiens
HVFSDGVTNWGRIVT

SEQ ID NO: 49108 - protein, 15 aa, Homo sapiens
VFSDGVTNWGRIVTL

SEQ ID NO: 49109 - protein, 15 aa, Homo sapiens
FSDGVTNWGRIVTLI

SEQ ID NO: 49110 - protein, 15 aa, Homo sapiens
SDGVTNWGRIVTLIS

SEQ ID NO: 49111 - protein, 15 aa, Homo sapiens
DGVTNWGRIVTLISF

SEQ ID NO: 49112 - protein, 15 aa, Homo sapiens
GVTNWGRIVTLISFG

SEQ ID NO: 49113 - protein, 15 aa, Homo sapiens
VTNWGRIVTLISFGA

SEQ ID NO: 49114 - protein, 15 aa, Homo sapiens
TNWGRIVTLISFGAF

SEQ ID NO: 49115 - protein, 15 aa, Homo sapiens
NWGRIVTLISFGAFV

SEQ ID NO: 49116 - protein, 15 aa, Homo sapiens
WGRIVTLISFGAFVA

SEQ ID NO: 49117 - protein, 15 aa, Homo sapiens
GRIVTLISFGAFVAK

SEQ ID NO: 49118 - protein, 15 aa, Homo sapiens
RIVTLISFGAFVAKH

SEQ ID NO: 49119 - protein, 15 aa, Homo sapiens
IVTLISFGAFVAKHL

SEQ ID NO: 49120 - protein, 15 aa, Homo sapiens
VTLISFGAFVAKHLK

SEQ ID NO: 49121 - protein, 15 aa, Homo sapiens
TLISFGAFVAKHLKT

SEQ ID NO: 49122 - protein, 15 aa, Homo sapiens
LISFGAFVAKHLKTI

SEQ ID NO: 49123 - protein, 15 aa, Homo sapiens
ISFGAFVAKHLKTIN

SEQ ID NO: 49124 - protein, 15 aa, Homo sapiens
SFGAFVAKHLKTINQ

SEQ ID NO: 49125 - protein, 15 aa, Homo sapiens
FGAFVAKHLKTINQE

SEQ ID NO: 49126 - protein, 15 aa, Homo sapiens
GAFVAKHLKTINQES

SEQ ID NO: 49127 - protein, 15 aa, Homo sapiens
AFVAKHLKTINQESC

SEQ ID NO: 49128 - protein, 15 aa, Homo sapiens
FVAKHLKTINQESCI

SEQ ID NO: 49129 - protein, 15 aa, Homo sapiens
VAKHLKTINQESCIE

SEQ ID NO: 49130 - protein, 15 aa, Homo sapiens
AKHLKTINQESCIEP

SEQ ID NO: 49131 - protein, 15 aa, Homo sapiens
KHLKTINQESCIEPL

SEQ ID NO: 49132 - protein, 15 aa, Homo sapiens
HLKTINQESCIEPLA

SEQ ID NO: 49133 - protein, 15 aa, Homo sapiens
LKTINQESCIEPLAE

SEQ ID NO: 49134 - protein, 15 aa, Homo sapiens
KTINQESCIEPLAES

SEQ ID NO: 49135 - protein, 15 aa, Homo sapiens
TINQESCIEPLAESI

SEQ ID NO: 49136 - protein, 15 aa, Homo sapiens
INQESCIEPLAESIT

SEQ ID NO: 49137 - protein, 15 aa, Homo sapiens
NQESCIEPLAESITD

SEQ ID NO: 49138 - protein, 15 aa, Homo sapiens
QESCIEPLAESITDV

SEQ ID NO: 49139 - protein, 15 aa, Homo sapiens
ESCIEPLAESITDVL

SEQ ID NO: 49140 - protein, 15 aa, Homo sapiens
SCIEPLAESITDVLV

SEQ ID NO: 49141 - protein, 15 aa, Homo sapiens
CIEPLAESITDVLVR

SEQ ID NO: 49142 - protein, 15 aa, Homo sapiens
IEPLAESITDVLVRT

SEQ ID NO: 49143 - protein, 15 aa, Homo sapiens
EPLAESITDVLVRTK

SEQ ID NO: 49144 - protein, 15 aa, Homo sapiens
PLAESITDVLVRTKR

SEQ ID NO: 49145 - protein, 15 aa, Homo sapiens
LAESITDVLVRTKRD

SEQ ID NO: 49146 - protein, 15 aa, Homo sapiens
AESITDVLVRTKRDW

SEQ ID NO: 49147 - protein, 15 aa, Homo sapiens
ESITDVLVRTKRDWL

SEQ ID NO: 49148 - protein, 15 aa, Homo sapiens
SITDVLVRTKRDWLV

SEQ ID NO: 49149 - protein, 15 aa, Homo sapiens
ITDVLVRTKRDWLVK

SEQ ID NO: 49150 - protein, 15 aa, Homo sapiens
TDVLVRTKRDWLVKQ

SEQ ID NO: 49151 - protein, 15 aa, Homo sapiens
DVLVRTKRDWLVKQR

SEQ ID NO: 49152 - protein, 15 aa, Homo sapiens
VLVRTKRDWLVKQRG

SEQ ID NO: 49153 - protein, 15 aa, Homo sapiens
LVRTKRDWLVKQRGW

SEQ ID NO: 49154 - protein, 15 aa, Homo sapiens
VRTKRDWLVKQRGWD

SEQ ID NO: 49155 - protein, 15 aa, Homo sapiens
RTKRDWLVKQRGWDG

SEQ ID NO: 49156 - protein, 15 aa, Homo sapiens
TKRDWLVKQRGWDGF

SEQ ID NO: 49157 - protein, 15 aa, Homo sapiens
KRDWLVKQRGWDGFV

SEQ ID NO: 49158 - protein, 15 aa, Homo sapiens
RDWLVKQRGWDGFVE

SEQ ID NO: 49159 - protein, 15 aa, Homo sapiens
DWLVKQRGWDGFVEF

SEQ ID NO: 49160 - protein, 15 aa, Homo sapiens
WLVKQRGWDGFVEFF

SEQ ID NO: 49161 - protein, 15 aa, Homo sapiens
LVKQRGWDGFVEFFH

SEQ ID NO: 49162 - protein, 15 aa, Homo sapiens
VKQRGWDGFVEFFHV

SEQ ID NO: 49163 - protein, 15 aa, Homo sapiens
KQRGWDGFVEFFHVE

SEQ ID NO: 49164 - protein, 15 aa, Homo sapiens
QRGWDGFVEFFHVED

SEQ ID NO: 49165 - protein, 15 aa, Homo sapiens
RGWDGFVEFFHVEDL

SEQ ID NO: 49166 - protein, 15 aa, Homo sapiens
GWDGFVEFFHVEDLE

SEQ ID NO: 49167 - protein, 15 aa, Homo sapiens
WDGFVEFFHVEDLEG

SEQ ID NO: 49168 - protein, 15 aa, Homo sapiens
DGFVEFFHVEDLEGG

SEQ ID NO: 49169 - protein, 15 aa, Homo sapiens
GFVEFFHVEDLEGGI

SEQ ID NO: 49170 - protein, 15 aa, Homo sapiens
FVEFFHVEDLEGGIR

SEQ ID NO: 49171 - protein, 15 aa, Homo sapiens
VEFFHVEDLEGGIRN

SEQ ID NO: 49172 - protein, 15 aa, Homo sapiens
EFFHVEDLEGGIRNV

SEQ ID NO: 49173 - protein, 15 aa, Homo sapiens
FFHVEDLEGGIRNVL

SEQ ID NO: 49174 - protein, 15 aa, Homo sapiens
FHVEDLEGGIRNVLL

SEQ ID NO: 49175 - protein, 15 aa, Homo sapiens
HVEDLEGGIRNVLLA

SEQ ID NO: 49176 - protein, 15 aa, Homo sapiens
VEDLEGGIRNVLLAF

SEQ ID NO: 49177 - protein, 15 aa, Homo sapiens
EDLEGGIRNVLLAFA

SEQ ID NO: 49178 - protein, 15 aa, Homo sapiens
DLEGGIRNVLLAFAG

SEQ ID NO: 49179 - protein, 15 aa, Homo sapiens
LEGGIRNVLLAFAGV

SEQ ID NO: 49180 - protein, 15 aa, Homo sapiens
EGGIRNVLLAFAGVA

SEQ ID NO: 49181 - protein, 15 aa, Homo sapiens
GGIRNVLLAFAGVAG

SEQ ID NO: 49182 - protein, 15 aa, Homo sapiens
GIRNVLLAFAGVAGV

SEQ ID NO: 49183 - protein, 15 aa, Homo sapiens
IRNVLLAFAGVAGVG

SEQ ID NO: 49184 - protein, 15 aa, Homo sapiens
RNVLLAFAGVAGVGA

SEQ ID NO: 49185 - protein, 15 aa, Homo sapiens
NVLLAFAGVAGVGAG

SEQ ID NO: 49186 - protein, 15 aa, Homo sapiens
VLLAFAGVAGVGAGL

SEQ ID NO: 49187 - protein, 15 aa, Homo sapiens
LLAFAGVAGVGAGLA

SEQ ID NO: 49188 - protein, 15 aa, Homo sapiens
LAFAGVAGVGAGLAY

SEQ ID NO: 49189 - protein, 15 aa, Homo sapiens
AFAGVAGVGAGLAYL

SEQ ID NO: 49190 - protein, 15 aa, Homo sapiens
FAGVAGVGAGLAYLI

SEQ ID NO: 49191 - protein, 15 aa, Homo sapiens
AGVAGVGAGLAYLIR

SEQ ID NO: 49192 - protein, 16 aa, Homo sapiens
MFGLKRNAVIGLNLYC

SEQ ID NO: 49193 - protein, 16 aa, Homo sapiens
FGLKRNAVIGLNLYCG

SEQ ID NO: 49194 - protein, 16 aa, Homo sapiens
GLKRNAVIGLNLYCGG

SEQ ID NO: 49195 - protein, 16 aa, Homo sapiens
LKRNAVIGLNLYCGGA

SEQ ID NO: 49196 - protein, 16 aa, Homo sapiens
KRNAVIGLNLYCGGAG

SEQ ID NO: 49197 - protein, 16 aa, Homo sapiens
RNAVIGLNLYCGGAGL

SEQ ID NO: 49198 - protein, 16 aa, Homo sapiens
NAVIGLNLYCGGAGLG

SEQ ID NO: 49199 - protein, 16 aa, Homo sapiens
AVIGLNLYCGGAGLGA

SEQ ID NO: 49200 - protein, 16 aa, Homo sapiens
VIGLNLYCGGAGLGAG

SEQ ID NO: 49201 - protein, 16 aa, Homo sapiens
IGLNLYCGGAGLGAGS

SEQ ID NO: 49202 - protein, 16 aa, Homo sapiens
GLNLYCGGAGLGAGSG

SEQ ID NO: 49203 - protein, 16 aa, Homo sapiens
LNLYCGGAGLGAGSGG

SEQ ID NO: 49204 - protein, 16 aa, Homo sapiens
NLYCGGAGLGAGSGGA

SEQ ID NO: 49205 - protein, 16 aa, Homo sapiens
LYCGGAGLGAGSGGAT

SEQ ID NO: 49206 - protein, 16 aa, Homo sapiens
YCGGAGLGAGSGGATR

SEQ ID NO: 49207 - protein, 16 aa, Homo sapiens
CGGAGLGAGSGGATRP

SEQ ID NO: 49208 - protein, 16 aa, Homo sapiens
GGAGLGAGSGGATRPG

SEQ ID NO: 49209 - protein, 16 aa, Homo sapiens
GAGLGAGSGGATRPGG

SEQ ID NO: 49210 - protein, 16 aa, Homo sapiens
AGLGAGSGGATRPGGR

SEQ ID NO: 49211 - protein, 16 aa, Homo sapiens
GLGAGSGGATRPGGRL

SEQ ID NO: 49212 - protein, 16 aa, Homo sapiens
LGAGSGGATRPGGRLL

SEQ ID NO: 49213 - protein, 16 aa, Homo sapiens
GAGSGGATRPGGRLLA

SEQ ID NO: 49214 - protein, 16 aa, Homo sapiens
AGSGGATRPGGRLLAT

SEQ ID NO: 49215 - protein, 16 aa, Homo sapiens
GSGGATRPGGRLLATE

SEQ ID NO: 49216 - protein, 16 aa, Homo sapiens
SGGATRPGGRLLATEK

SEQ ID NO: 49217 - protein, 16 aa, Homo sapiens
GGATRPGGRLLATEKE

SEQ ID NO: 49218 - protein, 16 aa, Homo sapiens
GATRPGGRLLATEKEA

SEQ ID NO: 49219 - protein, 16 aa, Homo sapiens
ATRPGGRLLATEKEAS

SEQ ID NO: 49220 - protein, 16 aa, Homo sapiens
TRPGGRLLATEKEASA

SEQ ID NO: 49221 - protein, 16 aa, Homo sapiens
RPGGRLLATEKEASAR

SEQ ID NO: 49222 - protein, 16 aa, Homo sapiens
PGGRLLATEKEASARR

SEQ ID NO: 49223 - protein, 16 aa, Homo sapiens
GGRLLATEKEASARRE

SEQ ID NO: 49224 - protein, 16 aa, Homo sapiens
GRLLATEKEASARREI

SEQ ID NO: 49225 - protein, 16 aa, Homo sapiens
RLLATEKEASARREIG

SEQ ID NO: 49226 - protein, 16 aa, Homo sapiens
LLATEKEASARREIGG

SEQ ID NO: 49227 - protein, 16 aa, Homo sapiens
LATEKEASARREIGGG

SEQ ID NO: 49228 - protein, 16 aa, Homo sapiens
ATEKEASARREIGGGE

SEQ ID NO: 49229 - protein, 16 aa, Homo sapiens
TEKEASARREIGGGEA

SEQ ID NO: 49230 - protein, 16 aa, Homo sapiens
EKEASARREIGGGEAG

SEQ ID NO: 49231 - protein, 16 aa, Homo sapiens
KEASARREIGGGEAGA

SEQ ID NO: 49232 - protein, 16 aa, Homo sapiens
EASARREIGGGEAGAV

SEQ ID NO: 49233 - protein, 16 aa, Homo sapiens
ASARREIGGGEAGAVI

SEQ ID NO: 49234 - protein, 16 aa, Homo sapiens
SARREIGGGEAGAVIG

SEQ ID NO: 49235 - protein, 16 aa, Homo sapiens
ARREIGGGEAGAVIGG

SEQ ID NO: 49236 - protein, 16 aa, Homo sapiens
RREIGGGEAGAVIGGS

SEQ ID NO: 49237 - protein, 16 aa, Homo sapiens
REIGGGEAGAVIGGSA

SEQ ID NO: 49238 - protein, 16 aa, Homo sapiens
EIGGGEAGAVIGGSAG

SEQ ID NO: 49239 - protein, 16 aa, Homo sapiens
IGGGEAGAVIGGSAGA

SEQ ID NO: 49240 - protein, 16 aa, Homo sapiens
GGGEAGAVIGGSAGAS

SEQ ID NO: 49241 - protein, 16 aa, Homo sapiens
GGEAGAVIGGSAGASP

SEQ ID NO: 49242 - protein, 16 aa, Homo sapiens
GEAGAVIGGSAGASPP

SEQ ID NO: 49243 - protein, 16 aa, Homo sapiens
EAGAVIGGSAGASPPS

SEQ ID NO: 49244 - protein, 16 aa, Homo sapiens
AGAVIGGSAGASPPST

SEQ ID NO: 49245 - protein, 16 aa, Homo sapiens
GAVIGGSAGASPPSTL

SEQ ID NO: 49246 - protein, 16 aa, Homo sapiens
AVIGGSAGASPPSTLT

SEQ ID NO: 49247 - protein, 16 aa, Homo sapiens
VIGGSAGASPPSTLTP

SEQ ID NO: 49248 - protein, 16 aa, Homo sapiens
IGGSAGASPPSTLTPD

SEQ ID NO: 49249 - protein, 16 aa, Homo sapiens
GGSAGASPPSTLTPDS

SEQ ID NO: 49250 - protein, 16 aa, Homo sapiens
GSAGASPPSTLTPDSR

SEQ ID NO: 49251 - protein, 16 aa, Homo sapiens
SAGASPPSTLTPDSRR

SEQ ID NO: 49252 - protein, 16 aa, Homo sapiens
AGASPPSTLTPDSRRV

SEQ ID NO: 49253 - protein, 16 aa, Homo sapiens
GASPPSTLTPDSRRVA

SEQ ID NO: 49254 - protein, 16 aa, Homo sapiens
ASPPSTLTPDSRRVAR

SEQ ID NO: 49255 - protein, 16 aa, Homo sapiens
SPPSTLTPDSRRVARP

SEQ ID NO: 49256 - protein, 16 aa, Homo sapiens
PPSTLTPDSRRVARPP

SEQ ID NO: 49257 - protein, 16 aa, Homo sapiens
PSTLTPDSRRVARPPP

SEQ ID NO: 49258 - protein, 16 aa, Homo sapiens
STLTPDSRRVARPPPI

SEQ ID NO: 49259 - protein, 16 aa, Homo sapiens
TLTPDSRRVARPPPIG

SEQ ID NO: 49260 - protein, 16 aa, Homo sapiens
LTPDSRRVARPPPIGA

SEQ ID NO: 49261 - protein, 16 aa, Homo sapiens
TPDSRRVARPPPIGAE

SEQ ID NO: 49262 - protein, 16 aa, Homo sapiens
PDSRRVARPPPIGAEV

SEQ ID NO: 49263 - protein, 16 aa, Homo sapiens
DSRRVARPPPIGAEVP

SEQ ID NO: 49264 - protein, 16 aa, Homo sapiens
SRRVARPPPIGAEVPD

SEQ ID NO: 49265 - protein, 16 aa, Homo sapiens
RRVARPPPIGAEVPDV

SEQ ID NO: 49266 - protein, 16 aa, Homo sapiens
RVARPPPIGAEVPDVT

SEQ ID NO: 49267 - protein, 16 aa, Homo sapiens
VARPPPIGAEVPDVTA

SEQ ID NO: 49268 - protein, 16 aa, Homo sapiens
ARPPPIGAEVPDVTAT

SEQ ID NO: 49269 - protein, 16 aa, Homo sapiens
RPPPIGAEVPDVTATP

SEQ ID NO: 49270 - protein, 16 aa, Homo sapiens
PPPIGAEVPDVTATPA

SEQ ID NO: 49271 - protein, 16 aa, Homo sapiens
PPIGAEVPDVTATPAR

SEQ ID NO: 49272 - protein, 16 aa, Homo sapiens
PIGAEVPDVTATPARL

SEQ ID NO: 49273 - protein, 16 aa, Homo sapiens
IGAEVPDVTATPARLL

SEQ ID NO: 49274 - protein, 16 aa, Homo sapiens
GAEVPDVTATPARLLF

SEQ ID NO: 49275 - protein, 16 aa, Homo sapiens
AEVPDVTATPARLLFF

SEQ ID NO: 49276 - protein, 16 aa, Homo sapiens
EVPDVTATPARLLFFA

SEQ ID NO: 49277 - protein, 16 aa, Homo sapiens
VPDVTATPARLLFFAP

SEQ ID NO: 49278 - protein, 16 aa, Homo sapiens
PDVTATPARLLFFAPT

SEQ ID NO: 49279 - protein, 16 aa, Homo sapiens
DVTATPARLLFFAPTR

SEQ ID NO: 49280 - protein, 16 aa, Homo sapiens
VTATPARLLFFAPTRR

SEQ ID NO: 49281 - protein, 16 aa, Homo sapiens
TATPARLLFFAPTRRA

SEQ ID NO: 49282 - protein, 16 aa, Homo sapiens
ATPARLLFFAPTRRAA

SEQ ID NO: 49283 - protein, 16 aa, Homo sapiens
TPARLLFFAPTRRAAP

SEQ ID NO: 49284 - protein, 16 aa, Homo sapiens
PARLLFFAPTRRAAPL

SEQ ID NO: 49285 - protein, 16 aa, Homo sapiens
ARLLFFAPTRRAAPLE

SEQ ID NO: 49286 - protein, 16 aa, Homo sapiens
RLLFFAPTRRAAPLEE

SEQ ID NO: 49287 - protein, 16 aa, Homo sapiens
LLFFAPTRRAAPLEEM

SEQ ID NO: 49288 - protein, 16 aa, Homo sapiens
LFFAPTRRAAPLEEME

SEQ ID NO: 49289 - protein, 16 aa, Homo sapiens
FFAPTRRAAPLEEMEA

SEQ ID NO: 49290 - protein, 16 aa, Homo sapiens
FAPTRRAAPLEEMEAP

SEQ ID NO: 49291 - protein, 16 aa, Homo sapiens
APTRRAAPLEEMEAPA

SEQ ID NO: 49292 - protein, 16 aa, Homo sapiens
PTRRAAPLEEMEAPAA

SEQ ID NO: 49293 - protein, 16 aa, Homo sapiens
TRRAAPLEEMEAPAAD

SEQ ID NO: 49294 - protein, 16 aa, Homo sapiens
RRAAPLEEMEAPAADA

SEQ ID NO: 49295 - protein, 16 aa, Homo sapiens
RAAPLEEMEAPAADAI

SEQ ID NO: 49296 - protein, 16 aa, Homo sapiens
AAPLEEMEAPAADAIM

SEQ ID NO: 49297 - protein, 16 aa, Homo sapiens
APLEEMEAPAADAIMS

SEQ ID NO: 49298 - protein, 16 aa, Homo sapiens
PLEEMEAPAADAIMSP

SEQ ID NO: 49299 - protein, 16 aa, Homo sapiens
LEEMEAPAADAIMSPE

SEQ ID NO: 49300 - protein, 16 aa, Homo sapiens
EEMEAPAADAIMSPEE

SEQ ID NO: 49301 - protein, 16 aa, Homo sapiens
EMEAPAADAIMSPEEE

SEQ ID NO: 49302 - protein, 16 aa, Homo sapiens
MEAPAADAIMSPEEEL

SEQ ID NO: 49303 - protein, 16 aa, Homo sapiens
EAPAADAIMSPEEELD

SEQ ID NO: 49304 - protein, 16 aa, Homo sapiens
APAADAIMSPEEELDG

SEQ ID NO: 49305 - protein, 16 aa, Homo sapiens
PAADAIMSPEEELDGY

SEQ ID NO: 49306 - protein, 16 aa, Homo sapiens
AADAIMSPEEELDGYE

SEQ ID NO: 49307 - protein, 16 aa, Homo sapiens
ADAIMSPEEELDGYEP

SEQ ID NO: 49308 - protein, 16 aa, Homo sapiens
DAIMSPEEELDGYEPE

SEQ ID NO: 49309 - protein, 16 aa, Homo sapiens
AIMSPEEELDGYEPEP

SEQ ID NO: 49310 - protein, 16 aa, Homo sapiens
IMSPEEELDGYEPEPL

SEQ ID NO: 49311 - protein, 16 aa, Homo sapiens
MSPEEELDGYEPEPLG

SEQ ID NO: 49312 - protein, 16 aa, Homo sapiens
SPEEELDGYEPEPLGK

SEQ ID NO: 49313 - protein, 16 aa, Homo sapiens
PEEELDGYEPEPLGKR

SEQ ID NO: 49314 - protein, 16 aa, Homo sapiens
EEELDGYEPEPLGKRP

SEQ ID NO: 49315 - protein, 16 aa, Homo sapiens
EELDGYEPEPLGKRPA

SEQ ID NO: 49316 - protein, 16 aa, Homo sapiens
ELDGYEPEPLGKRPAV

SEQ ID NO: 49317 - protein, 16 aa, Homo sapiens
LDGYEPEPLGKRPAVL

SEQ ID NO: 49318 - protein, 16 aa, Homo sapiens
DGYEPEPLGKRPAVLP

SEQ ID NO: 49319 - protein, 16 aa, Homo sapiens
GYEPEPLGKRPAVLPL

SEQ ID NO: 49320 - protein, 16 aa, Homo sapiens
YEPEPLGKRPAVLPLL

SEQ ID NO: 49321 - protein, 16 aa, Homo sapiens
EPEPLGKRPAVLPLLE

SEQ ID NO: 49322 - protein, 16 aa, Homo sapiens
PEPLGKRPAVLPLLEL

SEQ ID NO: 49323 - protein, 16 aa, Homo sapiens
EPLGKRPAVLPLLELV

SEQ ID NO: 49324 - protein, 16 aa, Homo sapiens
PLGKRPAVLPLLELVG

SEQ ID NO: 49325 - protein, 16 aa, Homo sapiens
LGKRPAVLPLLELVGE

SEQ ID NO: 49326 - protein, 16 aa, Homo sapiens
GKRPAVLPLLELVGES

SEQ ID NO: 49327 - protein, 16 aa, Homo sapiens
KRPAVLPLLELVGESG

SEQ ID NO: 49328 - protein, 16 aa, Homo sapiens
RPAVLPLLELVGESGN

SEQ ID NO: 49329 - protein, 16 aa, Homo sapiens
PAVLPLLELVGESGNN

SEQ ID NO: 49330 - protein, 16 aa, Homo sapiens
AVLPLLELVGESGNNT

SEQ ID NO: 49331 - protein, 16 aa, Homo sapiens
VLPLLELVGESGNNTS

SEQ ID NO: 49332 - protein, 16 aa, Homo sapiens
LPLLELVGESGNNTST

SEQ ID NO: 49333 - protein, 16 aa, Homo sapiens
PLLELVGESGNNTSTD

SEQ ID NO: 49334 - protein, 16 aa, Homo sapiens
LLELVGESGNNTSTDG

SEQ ID NO: 49335 - protein, 16 aa, Homo sapiens
LELVGESGNNTSTDGS

SEQ ID NO: 49336 - protein, 16 aa, Homo sapiens
ELVGESGNNTSTDGSL

SEQ ID NO: 49337 - protein, 16 aa, Homo sapiens
LVGESGNNTSTDGSLP

SEQ ID NO: 49338 - protein, 16 aa, Homo sapiens
VGESGNNTSTDGSLPS

SEQ ID NO: 49339 - protein, 16 aa, Homo sapiens
GESGNNTSTDGSLPST

SEQ ID NO: 49340 - protein, 16 aa, Homo sapiens
ESGNNTSTDGSLPSTP

SEQ ID NO: 49341 - protein, 16 aa, Homo sapiens
SGNNTSTDGSLPSTPP

SEQ ID NO: 49342 - protein, 16 aa, Homo sapiens
GNNTSTDGSLPSTPPP

SEQ ID NO: 49343 - protein, 16 aa, Homo sapiens
NNTSTDGSLPSTPPPA

SEQ ID NO: 49344 - protein, 16 aa, Homo sapiens
NTSTDGSLPSTPPPAE

SEQ ID NO: 49345 - protein, 16 aa, Homo sapiens
TSTDGSLPSTPPPAEE

SEQ ID NO: 49346 - protein, 16 aa, Homo sapiens
STDGSLPSTPPPAEEE

SEQ ID NO: 49347 - protein, 16 aa, Homo sapiens
TDGSLPSTPPPAEEEE

SEQ ID NO: 49348 - protein, 16 aa, Homo sapiens
DGSLPSTPPPAEEEED

SEQ ID NO: 49349 - protein, 16 aa, Homo sapiens
GSLPSTPPPAEEEEDD

SEQ ID NO: 49350 - protein, 16 aa, Homo sapiens
SLPSTPPPAEEEEDDL

SEQ ID NO: 49351 - protein, 16 aa, Homo sapiens
LPSTPPPAEEEEDDLY

SEQ ID NO: 49352 - protein, 16 aa, Homo sapiens
PSTPPPAEEEEDDLYR

SEQ ID NO: 49353 - protein, 16 aa, Homo sapiens
STPPPAEEEEDDLYRQ

SEQ ID NO: 49354 - protein, 16 aa, Homo sapiens
TPPPAEEEEDDLYRQS

SEQ ID NO: 49355 - protein, 16 aa, Homo sapiens
PPPAEEEEDDLYRQSL

SEQ ID NO: 49356 - protein, 16 aa, Homo sapiens
PPAEEEEDDLYRQSLE

SEQ ID NO: 49357 - protein, 16 aa, Homo sapiens
PAEEEEDDLYRQSLEI

SEQ ID NO: 49358 - protein, 16 aa, Homo sapiens
AEEEEDDLYRQSLEII

SEQ ID NO: 49359 - protein, 16 aa, Homo sapiens
EEEEDDLYRQSLEIIS

SEQ ID NO: 49360 - protein, 16 aa, Homo sapiens
EEEDDLYRQSLEIISR

SEQ ID NO: 49361 - protein, 16 aa, Homo sapiens
EEDDLYRQSLEIISRY

SEQ ID NO: 49362 - protein, 16 aa, Homo sapiens
EDDLYRQSLEIISRYL

SEQ ID NO: 49363 - protein, 16 aa, Homo sapiens
DDLYRQSLEIISRYLR

SEQ ID NO: 49364 - protein, 16 aa, Homo sapiens
DLYRQSLEIISRYLRE

SEQ ID NO: 49365 - protein, 16 aa, Homo sapiens
LYRQSLEIISRYLREQ

SEQ ID NO: 49366 - protein, 16 aa, Homo sapiens
YRQSLEIISRYLREQA

SEQ ID NO: 49367 - protein, 16 aa, Homo sapiens
RQSLEIISRYLREQAT

SEQ ID NO: 49368 - protein, 16 aa, Homo sapiens
QSLEIISRYLREQATG

SEQ ID NO: 49369 - protein, 16 aa, Homo sapiens
SLEIISRYLREQATGA

SEQ ID NO: 49370 - protein, 16 aa, Homo sapiens
LEIISRYLREQATGAK

SEQ ID NO: 49371 - protein, 16 aa, Homo sapiens
EIISRYLREQATGAKD

SEQ ID NO: 49372 - protein, 16 aa, Homo sapiens
IISRYLREQATGAKDT

SEQ ID NO: 49373 - protein, 16 aa, Homo sapiens
ISRYLREQATGAKDTK

SEQ ID NO: 49374 - protein, 16 aa, Homo sapiens
SRYLREQATGAKDTKP

SEQ ID NO: 49375 - protein, 16 aa, Homo sapiens
RYLREQATGAKDTKPM

SEQ ID NO: 49376 - protein, 16 aa, Homo sapiens
YLREQATGAKDTKPMG

SEQ ID NO: 49377 - protein, 16 aa, Homo sapiens
LREQATGAKDTKPMGR

SEQ ID NO: 49378 - protein, 16 aa, Homo sapiens
REQATGAKDTKPMGRS

SEQ ID NO: 49379 - protein, 16 aa, Homo sapiens
EQATGAKDTKPMGRSG

SEQ ID NO: 49380 - protein, 16 aa, Homo sapiens
QATGAKDTKPMGRSGA

SEQ ID NO: 49381 - protein, 16 aa, Homo sapiens
ATGAKDTKPMGRSGAT

SEQ ID NO: 49382 - protein, 16 aa, Homo sapiens
TGAKDTKPMGRSGATS

SEQ ID NO: 49383 - protein, 16 aa, Homo sapiens
GAKDTKPMGRSGATSR

SEQ ID NO: 49384 - protein, 16 aa, Homo sapiens
AKDTKPMGRSGATSRK

SEQ ID NO: 49385 - protein, 16 aa, Homo sapiens
KDTKPMGRSGATSRKA

SEQ ID NO: 49386 - protein, 16 aa, Homo sapiens
DTKPMGRSGATSRKAL

SEQ ID NO: 49387 - protein, 16 aa, Homo sapiens
TKPMGRSGATSRKALE

SEQ ID NO: 49388 - protein, 16 aa, Homo sapiens
KPMGRSGATSRKALET

SEQ ID NO: 49389 - protein, 16 aa, Homo sapiens
PMGRSGATSRKALETL

SEQ ID NO: 49390 - protein, 16 aa, Homo sapiens
MGRSGATSRKALETLR

SEQ ID NO: 49391 - protein, 16 aa, Homo sapiens
GRSGATSRKALETLRR

SEQ ID NO: 49392 - protein, 16 aa, Homo sapiens
RSGATSRKALETLRRV

SEQ ID NO: 49393 - protein, 16 aa, Homo sapiens
SGATSRKALETLRRVG

SEQ ID NO: 49394 - protein, 16 aa, Homo sapiens
GATSRKALETLRRVGD

SEQ ID NO: 49395 - protein, 16 aa, Homo sapiens
ATSRKALETLRRVGDG

SEQ ID NO: 49396 - protein, 16 aa, Homo sapiens
TSRKALETLRRVGDGV

SEQ ID NO: 49397 - protein, 16 aa, Homo sapiens
SRKALETLRRVGDGVQ

SEQ ID NO: 49398 - protein, 16 aa, Homo sapiens
RKALETLRRVGDGVQR

SEQ ID NO: 49399 - protein, 16 aa, Homo sapiens
KALETLRRVGDGVQRN

SEQ ID NO: 49400 - protein, 16 aa, Homo sapiens
ALETLRRVGDGVQRNH

SEQ ID NO: 49401 - protein, 16 aa, Homo sapiens
LETLRRVGDGVQRNHE

SEQ ID NO: 49402 - protein, 16 aa, Homo sapiens
ETLRRVGDGVQRNHET

SEQ ID NO: 49403 - protein, 16 aa, Homo sapiens
TLRRVGDGVQRNHETA

SEQ ID NO: 49404 - protein, 16 aa, Homo sapiens
LRRVGDGVQRNHETAF

SEQ ID NO: 49405 - protein, 16 aa, Homo sapiens
RRVGDGVQRNHETAFQ

SEQ ID NO: 49406 - protein, 16 aa, Homo sapiens
RVGDGVQRNHETAFQG

SEQ ID NO: 49407 - protein, 16 aa, Homo sapiens
VGDGVQRNHETAFQGM

SEQ ID NO: 49408 - protein, 16 aa, Homo sapiens
GDGVQRNHETAFQGML

SEQ ID NO: 49409 - protein, 16 aa, Homo sapiens
DGVQRNHETAFQGMLR

SEQ ID NO: 49410 - protein, 16 aa, Homo sapiens
GVQRNHETAFQGMLRK

SEQ ID NO: 49411 - protein, 16 aa, Homo sapiens
VQRNHETAFQGMLRKL

SEQ ID NO: 49412 - protein, 16 aa, Homo sapiens
QRNHETAFQGMLRKLD

SEQ ID NO: 49413 - protein, 16 aa, Homo sapiens
RNHETAFQGMLRKLDI

SEQ ID NO: 49414 - protein, 16 aa, Homo sapiens
NHETAFQGMLRKLDIK

SEQ ID NO: 49415 - protein, 16 aa, Homo sapiens
HETAFQGMLRKLDIKN

SEQ ID NO: 49416 - protein, 16 aa, Homo sapiens
ETAFQGMLRKLDIKNE

SEQ ID NO: 49417 - protein, 16 aa, Homo sapiens
TAFQGMLRKLDIKNED

SEQ ID NO: 49418 - protein, 16 aa, Homo sapiens
AFQGMLRKLDIKNEDD

SEQ ID NO: 49419 - protein, 16 aa, Homo sapiens
FQGMLRKLDIKNEDDV

SEQ ID NO: 49420 - protein, 16 aa, Homo sapiens
QGMLRKLDIKNEDDVK

SEQ ID NO: 49421 - protein, 16 aa, Homo sapiens
GMLRKLDIKNEDDVKS

SEQ ID NO: 49422 - protein, 16 aa, Homo sapiens
MLRKLDIKNEDDVKSL

SEQ ID NO: 49423 - protein, 16 aa, Homo sapiens
LRKLDIKNEDDVKSLS

SEQ ID NO: 49424 - protein, 16 aa, Homo sapiens
RKLDIKNEDDVKSLSR

SEQ ID NO: 49425 - protein, 16 aa, Homo sapiens
KLDIKNEDDVKSLSRV

SEQ ID NO: 49426 - protein, 16 aa, Homo sapiens
LDIKNEDDVKSLSRVM

SEQ ID NO: 49427 - protein, 16 aa, Homo sapiens
DIKNEDDVKSLSRVMI

SEQ ID NO: 49428 - protein, 16 aa, Homo sapiens
IKNEDDVKSLSRVMIH

SEQ ID NO: 49429 - protein, 16 aa, Homo sapiens
KNEDDVKSLSRVMIHV

SEQ ID NO: 49430 - protein, 16 aa, Homo sapiens
NEDDVKSLSRVMIHVF

SEQ ID NO: 49431 - protein, 16 aa, Homo sapiens
EDDVKSLSRVMIHVFS

SEQ ID NO: 49432 - protein, 16 aa, Homo sapiens
DDVKSLSRVMIHVFSD

SEQ ID NO: 49433 - protein, 16 aa, Homo sapiens
DVKSLSRVMIHVFSDG

SEQ ID NO: 49434 - protein, 16 aa, Homo sapiens
VKSLSRVMIHVFSDGV

SEQ ID NO: 49435 - protein, 16 aa, Homo sapiens
KSLSRVMIHVFSDGVT

SEQ ID NO: 49436 - protein, 16 aa, Homo sapiens
SLSRVMIHVFSDGVTN

SEQ ID NO: 49437 - protein, 16 aa, Homo sapiens
LSRVMIHVFSDGVTNW

SEQ ID NO: 49438 - protein, 16 aa, Homo sapiens
SRVMIHVFSDGVTNWG

SEQ ID NO: 49439 - protein, 16 aa, Homo sapiens
RVMIHVFSDGVTNWGR

SEQ ID NO: 49440 - protein, 16 aa, Homo sapiens
VMIHVFSDGVTNWGRI

SEQ ID NO: 49441 - protein, 16 aa, Homo sapiens
MIHVFSDGVTNWGRIV

SEQ ID NO: 49442 - protein, 16 aa, Homo sapiens
IHVFSDGVTNWGRIVT

SEQ ID NO: 49443 - protein, 16 aa, Homo sapiens
HVFSDGVTNWGRIVTL

SEQ ID NO: 49444 - protein, 16 aa, Homo sapiens
VFSDGVTNWGRIVTLI

SEQ ID NO: 49445 - protein, 16 aa, Homo sapiens
FSDGVTNWGRIVTLIS

SEQ ID NO: 49446 - protein, 16 aa, Homo sapiens
SDGVTNWGRIVTLISF

SEQ ID NO: 49447 - protein, 16 aa, Homo sapiens
DGVTNWGRIVTLISFG

SEQ ID NO: 49448 - protein, 16 aa, Homo sapiens
GVTNWGRIVTLISFGA

SEQ ID NO: 49449 - protein, 16 aa, Homo sapiens
VTNWGRIVTLISFGAF

SEQ ID NO: 49450 - protein, 16 aa, Homo sapiens
TNWGRIVTLISFGAFV

SEQ ID NO: 49451 - protein, 16 aa, Homo sapiens
NWGRIVTLISFGAFVA

SEQ ID NO: 49452 - protein, 16 aa, Homo sapiens
WGRIVTLISFGAFVAK

SEQ ID NO: 49453 - protein, 16 aa, Homo sapiens
GRIVTLISFGAFVAKH

SEQ ID NO: 49454 - protein, 16 aa, Homo sapiens
RIVTLISFGAFVAKHL

SEQ ID NO: 49455 - protein, 16 aa, Homo sapiens
IVTLISFGAFVAKHLK

SEQ ID NO: 49456 - protein, 16 aa, Homo sapiens
VTLISFGAFVAKHLKT

SEQ ID NO: 49457 - protein, 16 aa, Homo sapiens
TLISFGAFVAKHLKTI

SEQ ID NO: 49458 - protein, 16 aa, Homo sapiens
LISFGAFVAKHLKTIN

SEQ ID NO: 49459 - protein, 16 aa, Homo sapiens
ISFGAFVAKHLKTINQ

SEQ ID NO: 49460 - protein, 16 aa, Homo sapiens
SFGAFVAKHLKTINQE

SEQ ID NO: 49461 - protein, 16 aa, Homo sapiens
FGAFVAKHLKTINQES

SEQ ID NO: 49462 - protein, 16 aa, Homo sapiens
GAFVAKHLKTINQESC

SEQ ID NO: 49463 - protein, 16 aa, Homo sapiens
AFVAKHLKTINQESCI

SEQ ID NO: 49464 - protein, 16 aa, Homo sapiens
FVAKHLKTINQESCIE

SEQ ID NO: 49465 - protein, 16 aa, Homo sapiens
VAKHLKTINQESCIEP

SEQ ID NO: 49466 - protein, 16 aa, Homo sapiens
AKHLKTINQESCIEPL

SEQ ID NO: 49467 - protein, 16 aa, Homo sapiens
KHLKTINQESCIEPLA

SEQ ID NO: 49468 - protein, 16 aa, Homo sapiens
HLKTINQESCIEPLAE

SEQ ID NO: 49469 - protein, 16 aa, Homo sapiens
LKTINQESCIEPLAES

SEQ ID NO: 49470 - protein, 16 aa, Homo sapiens
KTINQESCIEPLAESI

SEQ ID NO: 49471 - protein, 16 aa, Homo sapiens
TINQESCIEPLAESIT

SEQ ID NO: 49472 - protein, 16 aa, Homo sapiens
INQESCIEPLAESITD

SEQ ID NO: 49473 - protein, 16 aa, Homo sapiens
NQESCIEPLAESITDV

SEQ ID NO: 49474 - protein, 16 aa, Homo sapiens
QESCIEPLAESITDVL

SEQ ID NO: 49475 - protein, 16 aa, Homo sapiens
ESCIEPLAESITDVLV

SEQ ID NO: 49476 - protein, 16 aa, Homo sapiens
SCIEPLAESITDVLVR

SEQ ID NO: 49477 - protein, 16 aa, Homo sapiens
CIEPLAESITDVLVRT

SEQ ID NO: 49478 - protein, 16 aa, Homo sapiens
IEPLAESITDVLVRTK

SEQ ID NO: 49479 - protein, 16 aa, Homo sapiens
EPLAESITDVLVRTKR

SEQ ID NO: 49480 - protein, 16 aa, Homo sapiens
PLAESITDVLVRTKRD

SEQ ID NO: 49481 - protein, 16 aa, Homo sapiens
LAESITDVLVRTKRDW

SEQ ID NO: 49482 - protein, 16 aa, Homo sapiens
AESITDVLVRTKRDWL

SEQ ID NO: 49483 - protein, 16 aa, Homo sapiens
ESITDVLVRTKRDWLV

SEQ ID NO: 49484 - protein, 16 aa, Homo sapiens
SITDVLVRTKRDWLVK

SEQ ID NO: 49485 - protein, 16 aa, Homo sapiens
ITDVLVRTKRDWLVKQ

SEQ ID NO: 49486 - protein, 16 aa, Homo sapiens
TDVLVRTKRDWLVKQR

SEQ ID NO: 49487 - protein, 16 aa, Homo sapiens
DVLVRTKRDWLVKQRG

SEQ ID NO: 49488 - protein, 16 aa, Homo sapiens
VLVRTKRDWLVKQRGW

SEQ ID NO: 49489 - protein, 16 aa, Homo sapiens
LVRTKRDWLVKQRGWD

SEQ ID NO: 49490 - protein, 16 aa, Homo sapiens
VRTKRDWLVKQRGWDG

SEQ ID NO: 49491 - protein, 16 aa, Homo sapiens
RTKRDWLVKQRGWDGF

SEQ ID NO: 49492 - protein, 16 aa, Homo sapiens
TKRDWLVKQRGWDGFV

SEQ ID NO: 49493 - protein, 16 aa, Homo sapiens
KRDWLVKQRGWDGFVE

SEQ ID NO: 49494 - protein, 16 aa, Homo sapiens
RDWLVKQRGWDGFVEF

SEQ ID NO: 49495 - protein, 16 aa, Homo sapiens
DWLVKQRGWDGFVEFF

SEQ ID NO: 49496 - protein, 16 aa, Homo sapiens
WLVKQRGWDGFVEFFH

SEQ ID NO: 49497 - protein, 16 aa, Homo sapiens
LVKQRGWDGFVEFFHV

SEQ ID NO: 49498 - protein, 16 aa, Homo sapiens
VKQRGWDGFVEFFHVE

SEQ ID NO: 49499 - protein, 16 aa, Homo sapiens
KQRGWDGFVEFFHVED

SEQ ID NO: 49500 - protein, 16 aa, Homo sapiens
QRGWDGFVEFFHVEDL

SEQ ID NO: 49501 - protein, 16 aa, Homo sapiens
RGWDGFVEFFHVEDLE

SEQ ID NO: 49502 - protein, 16 aa, Homo sapiens
GWDGFVEFFHVEDLEG

SEQ ID NO: 49503 - protein, 16 aa, Homo sapiens
WDGFVEFFHVEDLEGG

SEQ ID NO: 49504 - protein, 16 aa, Homo sapiens
DGFVEFFHVEDLEGGI

SEQ ID NO: 49505 - protein, 16 aa, Homo sapiens
GFVEFFHVEDLEGGIR

SEQ ID NO: 49506 - protein, 16 aa, Homo sapiens
FVEFFHVEDLEGGIRN

SEQ ID NO: 49507 - protein, 16 aa, Homo sapiens
VEFFHVEDLEGGIRNV

SEQ ID NO: 49508 - protein, 16 aa, Homo sapiens
EFFHVEDLEGGIRNVL

SEQ ID NO: 49509 - protein, 16 aa, Homo sapiens
FFHVEDLEGGIRNVLL

SEQ ID NO: 49510 - protein, 16 aa, Homo sapiens
FHVEDLEGGIRNVLLA

SEQ ID NO: 49511 - protein, 16 aa, Homo sapiens
HVEDLEGGIRNVLLAF

SEQ ID NO: 49512 - protein, 16 aa, Homo sapiens
VEDLEGGIRNVLLAFA

SEQ ID NO: 49513 - protein, 16 aa, Homo sapiens
EDLEGGIRNVLLAFAG

SEQ ID NO: 49514 - protein, 16 aa, Homo sapiens
DLEGGIRNVLLAFAGV

SEQ ID NO: 49515 - protein, 16 aa, Homo sapiens
LEGGIRNVLLAFAGVA

SEQ ID NO: 49516 - protein, 16 aa, Homo sapiens
EGGIRNVLLAFAGVAG

SEQ ID NO: 49517 - protein, 16 aa, Homo sapiens
GGIRNVLLAFAGVAGV

SEQ ID NO: 49518 - protein, 16 aa, Homo sapiens
GIRNVLLAFAGVAGVG

SEQ ID NO: 49519 - protein, 16 aa, Homo sapiens
IRNVLLAFAGVAGVGA

SEQ ID NO: 49520 - protein, 16 aa, Homo sapiens
RNVLLAFAGVAGVGAG

SEQ ID NO: 49521 - protein, 16 aa, Homo sapiens
NVLLAFAGVAGVGAGL

SEQ ID NO: 49522 - protein, 16 aa, Homo sapiens
VLLAFAGVAGVGAGLA

SEQ ID NO: 49523 - protein, 16 aa, Homo sapiens
LLAFAGVAGVGAGLAY

SEQ ID NO: 49524 - protein, 16 aa, Homo sapiens
LAFAGVAGVGAGLAYL

SEQ ID NO: 49525 - protein, 16 aa, Homo sapiens
AFAGVAGVGAGLAYLI

SEQ ID NO: 49526 - protein, 16 aa, Homo sapiens
FAGVAGVGAGLAYLIR

SEQ ID NO: 49527 - protein, 8 aa, Borrelia afzelii
MKKNTLSA

SEQ ID NO: 49528 - protein, 8 aa, Borrelia afzelii
KKNTLSAI

SEQ ID NO: 49529 - protein, 8 aa, Borrelia afzelii
KNTLSAIL

SEQ ID NO: 49530 - protein, 8 aa, Borrelia afzelii
NTLSAILM

SEQ ID NO: 49531 - protein, 8 aa, Borrelia afzelii
TLSAILMT

SEQ ID NO: 49532 - protein, 8 aa, Borrelia afzelii
LSAILMTL

SEQ ID NO: 49533 - protein, 8 aa, Borrelia afzelii
SAILMTLF

SEQ ID NO: 49534 - protein, 8 aa, Borrelia afzelii
AILMTLFL

SEQ ID NO: 49535 - protein, 8 aa, Borrelia afzelii
ILMTLFLF

SEQ ID NO: 49536 - protein, 8 aa, Borrelia afzelii
LMTLFLFI

SEQ ID NO: 49537 - protein, 8 aa, Borrelia afzelii
MTLFLFIS

SEQ ID NO: 49538 - protein, 8 aa, Borrelia afzelii
TLFLFISC

SEQ ID NO: 49539 - protein, 8 aa, Borrelia afzelii
LFLFISCN

SEQ ID NO: 49540 - protein, 8 aa, Borrelia afzelii
FLFISCNN

SEQ ID NO: 49541 - protein, 8 aa, Borrelia afzelii
LFISCNNS

SEQ ID NO: 49542 - protein, 8 aa, Borrelia afzelii
FISCNNSG

SEQ ID NO: 49543 - protein, 8 aa, Borrelia afzelii
ISCNNSGK

SEQ ID NO: 49544 - protein, 8 aa, Borrelia afzelii
SCNNSGKG

SEQ ID NO: 49545 - protein, 8 aa, Borrelia afzelii
CNNSGKGG

SEQ ID NO: 49546 - protein, 8 aa, Borrelia afzelii
NNSGKGGD

SEQ ID NO: 49547 - protein, 8 aa, Borrelia afzelii
NSGKGGDS

SEQ ID NO: 49548 - protein, 8 aa, Borrelia afzelii
SGKGGDSA

SEQ ID NO: 49549 - protein, 8 aa, Borrelia afzelii
GKGGDSAS

SEQ ID NO: 49550 - protein, 8 aa, Borrelia afzelii
KGGDSAST

SEQ ID NO: 49551 - protein, 8 aa, Borrelia afzelii
GGDSASTN

SEQ ID NO: 49552 - protein, 8 aa, Borrelia afzelii
GDSASTNP

SEQ ID NO: 49553 - protein, 8 aa, Borrelia afzelii
DSASTNPA

SEQ ID NO: 49554 - protein, 8 aa, Borrelia afzelii
SASTNPAD

SEQ ID NO: 49555 - protein, 8 aa, Borrelia afzelii
ASTNPADE

SEQ ID NO: 49556 - protein, 8 aa, Borrelia afzelii
STNPADES

SEQ ID NO: 49557 - protein, 8 aa, Borrelia afzelii
TNPADESA

SEQ ID NO: 49558 - protein, 8 aa, Borrelia afzelii
NPADESAK

SEQ ID NO: 49559 - protein, 8 aa, Borrelia afzelii
PADESAKG

SEQ ID NO: 49560 - protein, 8 aa, Borrelia afzelii
ADESAKGP

SEQ ID NO: 49561 - protein, 8 aa, Borrelia afzelii
DESAKGPN

SEQ ID NO: 49562 - protein, 8 aa, Borrelia afzelii
ESAKGPNL

SEQ ID NO: 49563 - protein, 8 aa, Borrelia afzelii
SAKGPNLT

SEQ ID NO: 49564 - protein, 8 aa, Borrelia afzelii
AKGPNLTE

SEQ ID NO: 49565 - protein, 8 aa, Borrelia afzelii
KGPNLTEI

SEQ ID NO: 49566 - protein, 8 aa, Borrelia afzelii
GPNLTEIS

SEQ ID NO: 49567 - protein, 8 aa, Borrelia afzelii
PNLTEISK

SEQ ID NO: 49568 - protein, 8 aa, Borrelia afzelii
NLTEISKK

SEQ ID NO: 49569 - protein, 8 aa, Borrelia afzelii
LTEISKKI

SEQ ID NO: 49570 - protein, 8 aa, Borrelia afzelii
TEISKKIT

SEQ ID NO: 49571 - protein, 8 aa, Borrelia afzelii
EISKKITD

SEQ ID NO: 49572 - protein, 8 aa, Borrelia afzelii
ISKKITDS

SEQ ID NO: 49573 - protein, 8 aa, Borrelia afzelii
SKKITDSN

SEQ ID NO: 49574 - protein, 8 aa, Borrelia afzelii
KKITDSNA

SEQ ID NO: 49575 - protein, 8 aa, Borrelia afzelii
KITDSNAF

SEQ ID NO: 49576 - protein, 8 aa, Borrelia afzelii
ITDSNAFV

SEQ ID NO: 49577 - protein, 8 aa, Borrelia afzelii
TDSNAFVL

SEQ ID NO: 49578 - protein, 8 aa, Borrelia afzelii
DSNAFVLA

SEQ ID NO: 49579 - protein, 8 aa, Borrelia afzelii
SNAFVLAV

SEQ ID NO: 49580 - protein, 8 aa, Borrelia afzelii
NAFVLAVK

SEQ ID NO: 49581 - protein, 8 aa, Borrelia afzelii
AFVLAVKE

SEQ ID NO: 49582 - protein, 8 aa, Borrelia afzelii
FVLAVKEV

SEQ ID NO: 49583 - protein, 8 aa, Borrelia afzelii
VLAVKEVE

SEQ ID NO: 49584 - protein, 8 aa, Borrelia afzelii
LAVKEVET

SEQ ID NO: 49585 - protein, 8 aa, Borrelia afzelii
AVKEVETL

SEQ ID NO: 49586 - protein, 8 aa, Borrelia afzelii
VKEVETLV

SEQ ID NO: 49587 - protein, 8 aa, Borrelia afzelii
KEVETLVS

SEQ ID NO: 49588 - protein, 8 aa, Borrelia afzelii
EVETLVSS

SEQ ID NO: 49589 - protein, 8 aa, Borrelia afzelii
VETLVSSI

SEQ ID NO: 49590 - protein, 8 aa, Borrelia afzelii
ETLVSSID

SEQ ID NO: 49591 - protein, 8 aa, Borrelia afzelii
TLVSSIDE

SEQ ID NO: 49592 - protein, 8 aa, Borrelia afzelii
LVSSIDEL

SEQ ID NO: 49593 - protein, 8 aa, Borrelia afzelii
VSSIDELA

SEQ ID NO: 49594 - protein, 8 aa, Borrelia afzelii
SSIDELAN

SEQ ID NO: 49595 - protein, 8 aa, Borrelia afzelii
SIDELANK

SEQ ID NO: 49596 - protein, 8 aa, Borrelia afzelii
IDELANKA

SEQ ID NO: 49597 - protein, 8 aa, Borrelia afzelii
DELANKAI

SEQ ID NO: 49598 - protein, 8 aa, Borrelia afzelii
ELANKAIG

SEQ ID NO: 49599 - protein, 8 aa, Borrelia afzelii
LANKAIGK

SEQ ID NO: 49600 - protein, 8 aa, Borrelia afzelii
ANKAIGKK

SEQ ID NO: 49601 - protein, 8 aa, Borrelia afzelii
NKAIGKKI

SEQ ID NO: 49602 - protein, 8 aa, Borrelia afzelii
KAIGKKIQ

SEQ ID NO: 49603 - protein, 8 aa, Borrelia afzelii
AIGKKIQQ

SEQ ID NO: 49604 - protein, 8 aa, Borrelia afzelii
IGKKIQQN

SEQ ID NO: 49605 - protein, 8 aa, Borrelia afzelii
GKKIQQNG

SEQ ID NO: 49606 - protein, 8 aa, Borrelia afzelii
KKIQQNGL

SEQ ID NO: 49607 - protein, 8 aa, Borrelia afzelii
KIQQNGLG

SEQ ID NO: 49608 - protein, 8 aa, Borrelia afzelii
IQQNGLGA

SEQ ID NO: 49609 - protein, 8 aa, Borrelia afzelii
QQNGLGAE

SEQ ID NO: 49610 - protein, 8 aa, Borrelia afzelii
QNGLGAEA

SEQ ID NO: 49611 - protein, 8 aa, Borrelia afzelii
NGLGAEAN

SEQ ID NO: 49612 - protein, 8 aa, Borrelia afzelii
GLGAEANR

SEQ ID NO: 49613 - protein, 8 aa, Borrelia afzelii
LGAEANRN

SEQ ID NO: 49614 - protein, 8 aa, Borrelia afzelii
GAEANRNE

SEQ ID NO: 49615 - protein, 8 aa, Borrelia afzelii
AEANRNES

SEQ ID NO: 49616 - protein, 8 aa, Borrelia afzelii
EANRNESL

SEQ ID NO: 49617 - protein, 8 aa, Borrelia afzelii
ANRNESLL

SEQ ID NO: 49618 - protein, 8 aa, Borrelia afzelii
NRNESLLA

SEQ ID NO: 49619 - protein, 8 aa, Borrelia afzelii
RNESLLAG

SEQ ID NO: 49620 - protein, 8 aa, Borrelia afzelii
NESLLAGV

SEQ ID NO: 49621 - protein, 8 aa, Borrelia afzelii
ESLLAGVH

SEQ ID NO: 49622 - protein, 8 aa, Borrelia afzelii
SLLAGVHE

SEQ ID NO: 49623 - protein, 8 aa, Borrelia afzelii
LLAGVHEI

SEQ ID NO: 49624 - protein, 8 aa, Borrelia afzelii
LAGVHEIS

SEQ ID NO: 49625 - protein, 8 aa, Borrelia afzelii
AGVHEIST

SEQ ID NO: 49626 - protein, 8 aa, Borrelia afzelii
GVHEISTL

SEQ ID NO: 49627 - protein, 8 aa, Borrelia afzelii
VHEISTLI

SEQ ID NO: 49628 - protein, 8 aa, Borrelia afzelii
HEISTLIT

SEQ ID NO: 49629 - protein, 8 aa, Borrelia afzelii
EISTLITE

SEQ ID NO: 49630 - protein, 8 aa, Borrelia afzelii
ISTLITEK

SEQ ID NO: 49631 - protein, 8 aa, Borrelia afzelii
STLITEKL

SEQ ID NO: 49632 - protein, 8 aa, Borrelia afzelii
TLITEKLS

SEQ ID NO: 49633 - protein, 8 aa, Borrelia afzelii
LITEKLSK

SEQ ID NO: 49634 - protein, 8 aa, Borrelia afzelii
ITEKLSKL

SEQ ID NO: 49635 - protein, 8 aa, Borrelia afzelii
TEKLSKLK

SEQ ID NO: 49636 - protein, 8 aa, Borrelia afzelii
EKLSKLKN

SEQ ID NO: 49637 - protein, 8 aa, Borrelia afzelii
KLSKLKNS

SEQ ID NO: 49638 - protein, 8 aa, Borrelia afzelii
LSKLKNSG

SEQ ID NO: 49639 - protein, 8 aa, Borrelia afzelii
SKLKNSGE

SEQ ID NO: 49640 - protein, 8 aa, Borrelia afzelii
KLKNSGEL

SEQ ID NO: 49641 - protein, 8 aa, Borrelia afzelii
LKNSGELK

SEQ ID NO: 49642 - protein, 8 aa, Borrelia afzelii
KNSGELKA

SEQ ID NO: 49643 - protein, 8 aa, Borrelia afzelii
NSGELKAK

SEQ ID NO: 49644 - protein, 8 aa, Borrelia afzelii
SGELKAKI

SEQ ID NO: 49645 - protein, 8 aa, Borrelia afzelii
GELKAKIE

SEQ ID NO: 49646 - protein, 8 aa, Borrelia afzelii
ELKAKIED

SEQ ID NO: 49647 - protein, 8 aa, Borrelia afzelii
LKAKIEDA

SEQ ID NO: 49648 - protein, 8 aa, Borrelia afzelii
KAKIEDAK

SEQ ID NO: 49649 - protein, 8 aa, Borrelia afzelii
AKIEDAKK

SEQ ID NO: 49650 - protein, 8 aa, Borrelia afzelii
KIEDAKKC

SEQ ID NO: 49651 - protein, 8 aa, Borrelia afzelii
IEDAKKCS

SEQ ID NO: 49652 - protein, 8 aa, Borrelia afzelii
EDAKKCSE

SEQ ID NO: 49653 - protein, 8 aa, Borrelia afzelii
DAKKCSEE

SEQ ID NO: 49654 - protein, 8 aa, Borrelia afzelii
AKKCSEEF

SEQ ID NO: 49655 - protein, 8 aa, Borrelia afzelii
KKCSEEFT

SEQ ID NO: 49656 - protein, 8 aa, Borrelia afzelii
KCSEEFTN

SEQ ID NO: 49657 - protein, 8 aa, Borrelia afzelii
CSEEFTNK

SEQ ID NO: 49658 - protein, 8 aa, Borrelia afzelii
SEEFTNKL

SEQ ID NO: 49659 - protein, 8 aa, Borrelia afzelii
EEFTNKLR

SEQ ID NO: 49660 - protein, 8 aa, Borrelia afzelii
EFTNKLRV

SEQ ID NO: 49661 - protein, 8 aa, Borrelia afzelii
FTNKLRVS

SEQ ID NO: 49662 - protein, 8 aa, Borrelia afzelii
TNKLRVSH

SEQ ID NO: 49663 - protein, 8 aa, Borrelia afzelii
NKLRVSHA

SEQ ID NO: 49664 - protein, 8 aa, Borrelia afzelii
KLRVSHAD

SEQ ID NO: 49665 - protein, 8 aa, Borrelia afzelii
LRVSHADL

SEQ ID NO: 49666 - protein, 8 aa, Borrelia afzelii
RVSHADLG

SEQ ID NO: 49667 - protein, 8 aa, Borrelia afzelii
VSHADLGK

SEQ ID NO: 49668 - protein, 8 aa, Borrelia afzelii
SHADLGKQ

SEQ ID NO: 49669 - protein, 8 aa, Borrelia afzelii
HADLGKQG

SEQ ID NO: 49670 - protein, 8 aa, Borrelia afzelii
ADLGKQGV

SEQ ID NO: 49671 - protein, 8 aa, Borrelia afzelii
DLGKQGVN

SEQ ID NO: 49672 - protein, 8 aa, Borrelia afzelii
LGKQGVND

SEQ ID NO: 49673 - protein, 8 aa, Borrelia afzelii
GKQGVNDD

SEQ ID NO: 49674 - protein, 8 aa, Borrelia afzelii
KQGVNDDD

SEQ ID NO: 49675 - protein, 8 aa, Borrelia afzelii
QGVNDDDA

SEQ ID NO: 49676 - protein, 8 aa, Borrelia afzelii
GVNDDDAK

SEQ ID NO: 49677 - protein, 8 aa, Borrelia afzelii
VNDDDAKK

SEQ ID NO: 49678 - protein, 8 aa, Borrelia afzelii
NDDDAKKA

SEQ ID NO: 49679 - protein, 8 aa, Borrelia afzelii
DDDAKKAI

SEQ ID NO: 49680 - protein, 8 aa, Borrelia afzelii
DDAKKAIL

SEQ ID NO: 49681 - protein, 8 aa, Borrelia afzelii
DAKKAILK

SEQ ID NO: 49682 - protein, 8 aa, Borrelia afzelii
AKKAILKT

SEQ ID NO: 49683 - protein, 8 aa, Borrelia afzelii
KKAILKTN

SEQ ID NO: 49684 - protein, 8 aa, Borrelia afzelii
KAILKTNA

SEQ ID NO: 49685 - protein, 8 aa, Borrelia afzelii
AILKTNAD

SEQ ID NO: 49686 - protein, 8 aa, Borrelia afzelii
ILKTNADK

SEQ ID NO: 49687 - protein, 8 aa, Borrelia afzelii
LKTNADKT

SEQ ID NO: 49688 - protein, 8 aa, Borrelia afzelii
KTNADKTK

SEQ ID NO: 49689 - protein, 8 aa, Borrelia afzelii
TNADKTKG

SEQ ID NO: 49690 - protein, 8 aa, Borrelia afzelii
NADKTKGA

SEQ ID NO: 49691 - protein, 8 aa, Borrelia afzelii
ADKTKGAE

SEQ ID NO: 49692 - protein, 8 aa, Borrelia afzelii
DKTKGAEE

SEQ ID NO: 49693 - protein, 8 aa, Borrelia afzelii
KTKGAEEL

SEQ ID NO: 49694 - protein, 8 aa, Borrelia afzelii
TKGAEELG

SEQ ID NO: 49695 - protein, 8 aa, Borrelia afzelii
KGAEELGK

SEQ ID NO: 49696 - protein, 8 aa, Borrelia afzelii
GAEELGKL

SEQ ID NO: 49697 - protein, 8 aa, Borrelia afzelii
AEELGKLF

SEQ ID NO: 49698 - protein, 8 aa, Borrelia afzelii
EELGKLFK

SEQ ID NO: 49699 - protein, 8 aa, Borrelia afzelii
ELGKLFKS

SEQ ID NO: 49700 - protein, 8 aa, Borrelia afzelii
LGKLFKSV

SEQ ID NO: 49701 - protein, 8 aa, Borrelia afzelii
GKLFKSVE

SEQ ID NO: 49702 - protein, 8 aa, Borrelia afzelii
KLFKSVEG

SEQ ID NO: 49703 - protein, 8 aa, Borrelia afzelii
LFKSVEGL

SEQ ID NO: 49704 - protein, 8 aa, Borrelia afzelii
FKSVEGLV

SEQ ID NO: 49705 - protein, 8 aa, Borrelia afzelii
KSVEGLVK

SEQ ID NO: 49706 - protein, 8 aa, Borrelia afzelii
SVEGLVKA

SEQ ID NO: 49707 - protein, 8 aa, Borrelia afzelii
VEGLVKAA

SEQ ID NO: 49708 - protein, 8 aa, Borrelia afzelii
EGLVKAAQ

SEQ ID NO: 49709 - protein, 8 aa, Borrelia afzelii
GLVKAAQE

SEQ ID NO: 49710 - protein, 8 aa, Borrelia afzelii
LVKAAQEA

SEQ ID NO: 49711 - protein, 8 aa, Borrelia afzelii
VKAAQEAL

SEQ ID NO: 49712 - protein, 8 aa, Borrelia afzelii
KAAQEALT

SEQ ID NO: 49713 - protein, 8 aa, Borrelia afzelii
AAQEALTN

SEQ ID NO: 49714 - protein, 8 aa, Borrelia afzelii
AQEALTNS

SEQ ID NO: 49715 - protein, 8 aa, Borrelia afzelii
QEALTNSV

SEQ ID NO: 49716 - protein, 8 aa, Borrelia afzelii
EALTNSVK

SEQ ID NO: 49717 - protein, 8 aa, Borrelia afzelii
ALTNSVKE

SEQ ID NO: 49718 - protein, 8 aa, Borrelia afzelii
LTNSVKEL

SEQ ID NO: 49719 - protein, 8 aa, Borrelia afzelii
TNSVKELT

SEQ ID NO: 49720 - protein, 8 aa, Borrelia afzelii
NSVKELTS

SEQ ID NO: 49721 - protein, 8 aa, Borrelia afzelii
SVKELTSP

SEQ ID NO: 49722 - protein, 8 aa, Borrelia afzelii
VKELTSPV

SEQ ID NO: 49723 - protein, 8 aa, Borrelia afzelii
KELTSPVV

SEQ ID NO: 49724 - protein, 8 aa, Borrelia afzelii
ELTSPVVA

SEQ ID NO: 49725 - protein, 8 aa, Borrelia afzelii
LTSPVVAE

SEQ ID NO: 49726 - protein, 8 aa, Borrelia afzelii
TSPVVAES

SEQ ID NO: 49727 - protein, 8 aa, Borrelia afzelii
SPVVAESP

SEQ ID NO: 49728 - protein, 8 aa, Borrelia afzelii
PVVAESPK

SEQ ID NO: 49729 - protein, 8 aa, Borrelia afzelii
VVAESPKK

SEQ ID NO: 49730 - protein, 8 aa, Borrelia afzelii
VAESPKKP

SEQ ID NO: 49731 - protein, 9 aa, Borrelia afzelii
MKKNTLSAI

SEQ ID NO: 49732 - protein, 9 aa, Borrelia afzelii
KKNTLSAIL

SEQ ID NO: 49733 - protein, 9 aa, Borrelia afzelii
KNTLSAILM

SEQ ID NO: 49734 - protein, 9 aa, Borrelia afzelii
NTLSAILMT

SEQ ID NO: 49735 - protein, 9 aa, Borrelia afzelii
TLSAILMTL

SEQ ID NO: 49736 - protein, 9 aa, Borrelia afzelii
LSAILMTLF

SEQ ID NO: 49737 - protein, 9 aa, Borrelia afzelii
SAILMTLFL

SEQ ID NO: 49738 - protein, 9 aa, Borrelia afzelii
AILMTLFLF

SEQ ID NO: 49739 - protein, 9 aa, Borrelia afzelii
ILMTLFLFI

SEQ ID NO: 49740 - protein, 9 aa, Borrelia afzelii
LMTLFLFIS

SEQ ID NO: 49741 - protein, 9 aa, Borrelia afzelii
MTLFLFISC

SEQ ID NO: 49742 - protein, 9 aa, Borrelia afzelii
TLFLFISCN

SEQ ID NO: 49743 - protein, 9 aa, Borrelia afzelii
LFLFISCNN

SEQ ID NO: 49744 - protein, 9 aa, Borrelia afzelii
FLFISCNNS

SEQ ID NO: 49745 - protein, 9 aa, Borrelia afzelii
LFISCNNSG

SEQ ID NO: 49746 - protein, 9 aa, Borrelia afzelii
FISCNNSGK

SEQ ID NO: 49747 - protein, 9 aa, Borrelia afzelii
ISCNNSGKG

SEQ ID NO: 49748 - protein, 9 aa, Borrelia afzelii
SCNNSGKGG

SEQ ID NO: 49749 - protein, 9 aa, Borrelia afzelii
CNNSGKGGD

SEQ ID NO: 49750 - protein, 9 aa, Borrelia afzelii
NNSGKGGDS

SEQ ID NO: 49751 - protein, 9 aa, Borrelia afzelii
NSGKGGDSA

SEQ ID NO: 49752 - protein, 9 aa, Borrelia afzelii
SGKGGDSAS

SEQ ID NO: 49753 - protein, 9 aa, Borrelia afzelii
GKGGDSAST

SEQ ID NO: 49754 - protein, 9 aa, Borrelia afzelii
KGGDSASTN

SEQ ID NO: 49755 - protein, 9 aa, Borrelia afzelii
GGDSASTNP

SEQ ID NO: 49756 - protein, 9 aa, Borrelia afzelii
GDSASTNPA

SEQ ID NO: 49757 - protein, 9 aa, Borrelia afzelii
DSASTNPAD

SEQ ID NO: 49758 - protein, 9 aa, Borrelia afzelii
SASTNPADE

SEQ ID NO: 49759 - protein, 9 aa, Borrelia afzelii
ASTNPADES

SEQ ID NO: 49760 - protein, 9 aa, Borrelia afzelii
STNPADESA

SEQ ID NO: 49761 - protein, 9 aa, Borrelia afzelii
TNPADESAK

SEQ ID NO: 49762 - protein, 9 aa, Borrelia afzelii
NPADESAKG

SEQ ID NO: 49763 - protein, 9 aa, Borrelia afzelii
PADESAKGP

SEQ ID NO: 49764 - protein, 9 aa, Borrelia afzelii
ADESAKGPN

SEQ ID NO: 49765 - protein, 9 aa, Borrelia afzelii
DESAKGPNL

SEQ ID NO: 49766 - protein, 9 aa, Borrelia afzelii
ESAKGPNLT

SEQ ID NO: 49767 - protein, 9 aa, Borrelia afzelii
SAKGPNLTE

SEQ ID NO: 49768 - protein, 9 aa, Borrelia afzelii
AKGPNLTEI

SEQ ID NO: 49769 - protein, 9 aa, Borrelia afzelii
KGPNLTEIS

SEQ ID NO: 49770 - protein, 9 aa, Borrelia afzelii
GPNLTEISK

SEQ ID NO: 49771 - protein, 9 aa, Borrelia afzelii
PNLTEISKK

SEQ ID NO: 49772 - protein, 9 aa, Borrelia afzelii
NLTEISKKI

SEQ ID NO: 49773 - protein, 9 aa, Borrelia afzelii
LTEISKKIT

SEQ ID NO: 49774 - protein, 9 aa, Borrelia afzelii
TEISKKITD

SEQ ID NO: 49775 - protein, 9 aa, Borrelia afzelii
EISKKITDS

SEQ ID NO: 49776 - protein, 9 aa, Borrelia afzelii
ISKKITDSN

SEQ ID NO: 49777 - protein, 9 aa, Borrelia afzelii
SKKITDSNA

SEQ ID NO: 49778 - protein, 9 aa, Borrelia afzelii
KKITDSNAF

SEQ ID NO: 49779 - protein, 9 aa, Borrelia afzelii
KITDSNAFV

SEQ ID NO: 49780 - protein, 9 aa, Borrelia afzelii
ITDSNAFVL

SEQ ID NO: 49781 - protein, 9 aa, Borrelia afzelii
TDSNAFVLA

SEQ ID NO: 49782 - protein, 9 aa, Borrelia afzelii
DSNAFVLAV

SEQ ID NO: 49783 - protein, 9 aa, Borrelia afzelii
SNAFVLAVK

SEQ ID NO: 49784 - protein, 9 aa, Borrelia afzelii
NAFVLAVKE

SEQ ID NO: 49785 - protein, 9 aa, Borrelia afzelii
AFVLAVKEV

SEQ ID NO: 49786 - protein, 9 aa, Borrelia afzelii
FVLAVKEVE

SEQ ID NO: 49787 - protein, 9 aa, Borrelia afzelii
VLAVKEVET

SEQ ID NO: 49788 - protein, 9 aa, Borrelia afzelii
LAVKEVETL

SEQ ID NO: 49789 - protein, 9 aa, Borrelia afzelii
AVKEVETLV

SEQ ID NO: 49790 - protein, 9 aa, Borrelia afzelii
VKEVETLVS

SEQ ID NO: 49791 - protein, 9 aa, Borrelia afzelii
KEVETLVSS

SEQ ID NO: 49792 - protein, 9 aa, Borrelia afzelii
EVETLVSSI

SEQ ID NO: 49793 - protein, 9 aa, Borrelia afzelii
VETLVSSID

SEQ ID NO: 49794 - protein, 9 aa, Borrelia afzelii
ETLVSSIDE

SEQ ID NO: 49795 - protein, 9 aa, Borrelia afzelii
TLVSSIDEL

SEQ ID NO: 49796 - protein, 9 aa, Borrelia afzelii
LVSSIDELA

SEQ ID NO: 49797 - protein, 9 aa, Borrelia afzelii
VSSIDELAN

SEQ ID NO: 49798 - protein, 9 aa, Borrelia afzelii
SSIDELANK

SEQ ID NO: 49799 - protein, 9 aa, Borrelia afzelii
SIDELANKA

SEQ ID NO: 49800 - protein, 9 aa, Borrelia afzelii
IDELANKAI

SEQ ID NO: 49801 - protein, 9 aa, Borrelia afzelii
DELANKAIG

SEQ ID NO: 49802 - protein, 9 aa, Borrelia afzelii
ELANKAIGK

SEQ ID NO: 49803 - protein, 9 aa, Borrelia afzelii
LANKAIGKK

SEQ ID NO: 49804 - protein, 9 aa, Borrelia afzelii
ANKAIGKKI

SEQ ID NO: 49805 - protein, 9 aa, Borrelia afzelii
NKAIGKKIQ

SEQ ID NO: 49806 - protein, 9 aa, Borrelia afzelii
KAIGKKIQQ

SEQ ID NO: 49807 - protein, 9 aa, Borrelia afzelii
AIGKKIQQN

SEQ ID NO: 49808 - protein, 9 aa, Borrelia afzelii
IGKKIQQNG

SEQ ID NO: 49809 - protein, 9 aa, Borrelia afzelii
GKKIQQNGL

SEQ ID NO: 49810 - protein, 9 aa, Borrelia afzelii
KKIQQNGLG

SEQ ID NO: 49811 - protein, 9 aa, Borrelia afzelii
KIQQNGLGA

SEQ ID NO: 49812 - protein, 9 aa, Borrelia afzelii
IQQNGLGAE

SEQ ID NO: 49813 - protein, 9 aa, Borrelia afzelii
QQNGLGAEA

SEQ ID NO: 49814 - protein, 9 aa, Borrelia afzelii
QNGLGAEAN

SEQ ID NO: 49815 - protein, 9 aa, Borrelia afzelii
NGLGAEANR

SEQ ID NO: 49816 - protein, 9 aa, Borrelia afzelii
GLGAEANRN

SEQ ID NO: 49817 - protein, 9 aa, Borrelia afzelii
LGAEANRNE

SEQ ID NO: 49818 - protein, 9 aa, Borrelia afzelii
GAEANRNES

SEQ ID NO: 49819 - protein, 9 aa, Borrelia afzelii
AEANRNESL

SEQ ID NO: 49820 - protein, 9 aa, Borrelia afzelii
EANRNESLL

SEQ ID NO: 49821 - protein, 9 aa, Borrelia afzelii
ANRNESLLA

SEQ ID NO: 49822 - protein, 9 aa, Borrelia afzelii
NRNESLLAG

SEQ ID NO: 49823 - protein, 9 aa, Borrelia afzelii
RNESLLAGV

SEQ ID NO: 49824 - protein, 9 aa, Borrelia afzelii
NESLLAGVH

SEQ ID NO: 49825 - protein, 9 aa, Borrelia afzelii
ESLLAGVHE

SEQ ID NO: 49826 - protein, 9 aa, Borrelia afzelii
SLLAGVHEI

SEQ ID NO: 49827 - protein, 9 aa, Borrelia afzelii
LLAGVHEIS

SEQ ID NO: 49828 - protein, 9 aa, Borrelia afzelii
LAGVHEIST

SEQ ID NO: 49829 - protein, 9 aa, Borrelia afzelii
AGVHEISTL

SEQ ID NO: 49830 - protein, 9 aa, Borrelia afzelii
GVHEISTLI

SEQ ID NO: 49831 - protein, 9 aa, Borrelia afzelii
VHEISTLIT

SEQ ID NO: 49832 - protein, 9 aa, Borrelia afzelii
HEISTLITE

SEQ ID NO: 49833 - protein, 9 aa, Borrelia afzelii
EISTLITEK

SEQ ID NO: 49834 - protein, 9 aa, Borrelia afzelii
ISTLITEKL

SEQ ID NO: 49835 - protein, 9 aa, Borrelia afzelii
STLITEKLS

SEQ ID NO: 49836 - protein, 9 aa, Borrelia afzelii
TLITEKLSK

SEQ ID NO: 49837 - protein, 9 aa, Borrelia afzelii
LITEKLSKL

SEQ ID NO: 49838 - protein, 9 aa, Borrelia afzelii
ITEKLSKLK

SEQ ID NO: 49839 - protein, 9 aa, Borrelia afzelii
TEKLSKLKN

SEQ ID NO: 49840 - protein, 9 aa, Borrelia afzelii
EKLSKLKNS

SEQ ID NO: 49841 - protein, 9 aa, Borrelia afzelii
KLSKLKNSG

SEQ ID NO: 49842 - protein, 9 aa, Borrelia afzelii
LSKLKNSGE

SEQ ID NO: 49843 - protein, 9 aa, Borrelia afzelii
SKLKNSGEL

SEQ ID NO: 49844 - protein, 9 aa, Borrelia afzelii
KLKNSGELK

SEQ ID NO: 49845 - protein, 9 aa, Borrelia afzelii
LKNSGELKA

SEQ ID NO: 49846 - protein, 9 aa, Borrelia afzelii
KNSGELKAK

SEQ ID NO: 49847 - protein, 9 aa, Borrelia afzelii
NSGELKAKI

SEQ ID NO: 49848 - protein, 9 aa, Borrelia afzelii
SGELKAKIE

SEQ ID NO: 49849 - protein, 9 aa, Borrelia afzelii
GELKAKIED

SEQ ID NO: 49850 - protein, 9 aa, Borrelia afzelii
ELKAKIEDA

SEQ ID NO: 49851 - protein, 9 aa, Borrelia afzelii
LKAKIEDAK

SEQ ID NO: 49852 - protein, 9 aa, Borrelia afzelii
KAKIEDAKK

SEQ ID NO: 49853 - protein, 9 aa, Borrelia afzelii
AKIEDAKKC

SEQ ID NO: 49854 - protein, 9 aa, Borrelia afzelii
KIEDAKKCS

SEQ ID NO: 49855 - protein, 9 aa, Borrelia afzelii
IEDAKKCSE

SEQ ID NO: 49856 - protein, 9 aa, Borrelia afzelii
EDAKKCSEE

SEQ ID NO: 49857 - protein, 9 aa, Borrelia afzelii
DAKKCSEEF

SEQ ID NO: 49858 - protein, 9 aa, Borrelia afzelii
AKKCSEEFT

SEQ ID NO: 49859 - protein, 9 aa, Borrelia afzelii
KKCSEEFTN

SEQ ID NO: 49860 - protein, 9 aa, Borrelia afzelii
KCSEEFTNK

SEQ ID NO: 49861 - protein, 9 aa, Borrelia afzelii
CSEEFTNKL

SEQ ID NO: 49862 - protein, 9 aa, Borrelia afzelii
SEEFTNKLR

SEQ ID NO: 49863 - protein, 9 aa, Borrelia afzelii
EEFTNKLRV

SEQ ID NO: 49864 - protein, 9 aa, Borrelia afzelii
EFTNKLRVS

SEQ ID NO: 49865 - protein, 9 aa, Borrelia afzelii
FTNKLRVSH

SEQ ID NO: 49866 - protein, 9 aa, Borrelia afzelii
TNKLRVSHA

SEQ ID NO: 49867 - protein, 9 aa, Borrelia afzelii
NKLRVSHAD

SEQ ID NO: 49868 - protein, 9 aa, Borrelia afzelii
KLRVSHADL

SEQ ID NO: 49869 - protein, 9 aa, Borrelia afzelii
LRVSHADLG

SEQ ID NO: 49870 - protein, 9 aa, Borrelia afzelii
RVSHADLGK

SEQ ID NO: 49871 - protein, 9 aa, Borrelia afzelii
VSHADLGKQ

SEQ ID NO: 49872 - protein, 9 aa, Borrelia afzelii
SHADLGKQG

SEQ ID NO: 49873 - protein, 9 aa, Borrelia afzelii
HADLGKQGV

SEQ ID NO: 49874 - protein, 9 aa, Borrelia afzelii
ADLGKQGVN

SEQ ID NO: 49875 - protein, 9 aa, Borrelia afzelii
DLGKQGVND

SEQ ID NO: 49876 - protein, 9 aa, Borrelia afzelii
LGKQGVNDD

SEQ ID NO: 49877 - protein, 9 aa, Borrelia afzelii
GKQGVNDDD

SEQ ID NO: 49878 - protein, 9 aa, Borrelia afzelii
KQGVNDDDA

SEQ ID NO: 49879 - protein, 9 aa, Borrelia afzelii
QGVNDDDAK

SEQ ID NO: 49880 - protein, 9 aa, Borrelia afzelii
GVNDDDAKK

SEQ ID NO: 49881 - protein, 9 aa, Borrelia afzelii
VNDDDAKKA

SEQ ID NO: 49882 - protein, 9 aa, Borrelia afzelii
NDDDAKKAI

SEQ ID NO: 49883 - protein, 9 aa, Borrelia afzelii
DDDAKKAIL

SEQ ID NO: 49884 - protein, 9 aa, Borrelia afzelii
DDAKKAILK

SEQ ID NO: 49885 - protein, 9 aa, Borrelia afzelii
DAKKAILKT

SEQ ID NO: 49886 - protein, 9 aa, Borrelia afzelii
AKKAILKTN

SEQ ID NO: 49887 - protein, 9 aa, Borrelia afzelii
KKAILKTNA

SEQ ID NO: 49888 - protein, 9 aa, Borrelia afzelii
KAILKTNAD

SEQ ID NO: 49889 - protein, 9 aa, Borrelia afzelii
AILKTNADK

SEQ ID NO: 49890 - protein, 9 aa, Borrelia afzelii
ILKTNADKT

SEQ ID NO: 49891 - protein, 9 aa, Borrelia afzelii
LKTNADKTK

SEQ ID NO: 49892 - protein, 9 aa, Borrelia afzelii
KTNADKTKG

SEQ ID NO: 49893 - protein, 9 aa, Borrelia afzelii
TNADKTKGA

SEQ ID NO: 49894 - protein, 9 aa, Borrelia afzelii
NADKTKGAE

SEQ ID NO: 49895 - protein, 9 aa, Borrelia afzelii
ADKTKGAEE

SEQ ID NO: 49896 - protein, 9 aa, Borrelia afzelii
DKTKGAEEL

SEQ ID NO: 49897 - protein, 9 aa, Borrelia afzelii
KTKGAEELG

SEQ ID NO: 49898 - protein, 9 aa, Borrelia afzelii
TKGAEELGK

SEQ ID NO: 49899 - protein, 9 aa, Borrelia afzelii
KGAEELGKL

SEQ ID NO: 49900 - protein, 9 aa, Borrelia afzelii
GAEELGKLF

SEQ ID NO: 49901 - protein, 9 aa, Borrelia afzelii
AEELGKLFK

SEQ ID NO: 49902 - protein, 9 aa, Borrelia afzelii
EELGKLFKS

SEQ ID NO: 49903 - protein, 9 aa, Borrelia afzelii
ELGKLFKSV

SEQ ID NO: 49904 - protein, 9 aa, Borrelia afzelii
LGKLFKSVE

SEQ ID NO: 49905 - protein, 9 aa, Borrelia afzelii
GKLFKSVEG

SEQ ID NO: 49906 - protein, 9 aa, Borrelia afzelii
KLFKSVEGL

SEQ ID NO: 49907 - protein, 9 aa, Borrelia afzelii
LFKSVEGLV

SEQ ID NO: 49908 - protein, 9 aa, Borrelia afzelii
FKSVEGLVK

SEQ ID NO: 49909 - protein, 9 aa, Borrelia afzelii
KSVEGLVKA

SEQ ID NO: 49910 - protein, 9 aa, Borrelia afzelii
SVEGLVKAA

SEQ ID NO: 49911 - protein, 9 aa, Borrelia afzelii
VEGLVKAAQ

SEQ ID NO: 49912 - protein, 9 aa, Borrelia afzelii
EGLVKAAQE

SEQ ID NO: 49913 - protein, 9 aa, Borrelia afzelii
GLVKAAQEA

SEQ ID NO: 49914 - protein, 9 aa, Borrelia afzelii
LVKAAQEAL

SEQ ID NO: 49915 - protein, 9 aa, Borrelia afzelii
VKAAQEALT

SEQ ID NO: 49916 - protein, 9 aa, Borrelia afzelii
KAAQEALTN

SEQ ID NO: 49917 - protein, 9 aa, Borrelia afzelii
AAQEALTNS

SEQ ID NO: 49918 - protein, 9 aa, Borrelia afzelii
AQEALTNSV

SEQ ID NO: 49919 - protein, 9 aa, Borrelia afzelii
QEALTNSVK

SEQ ID NO: 49920 - protein, 9 aa, Borrelia afzelii
EALTNSVKE

SEQ ID NO: 49921 - protein, 9 aa, Borrelia afzelii
ALTNSVKEL

SEQ ID NO: 49922 - protein, 9 aa, Borrelia afzelii
LTNSVKELT

SEQ ID NO: 49923 - protein, 9 aa, Borrelia afzelii
TNSVKELTS

SEQ ID NO: 49924 - protein, 9 aa, Borrelia afzelii
NSVKELTSP

SEQ ID NO: 49925 - protein, 9 aa, Borrelia afzelii
SVKELTSPV

SEQ ID NO: 49926 - protein, 9 aa, Borrelia afzelii
VKELTSPVV

SEQ ID NO: 49927 - protein, 9 aa, Borrelia afzelii
KELTSPVVA

SEQ ID NO: 49928 - protein, 9 aa, Borrelia afzelii
ELTSPVVAE

SEQ ID NO: 49929 - protein, 9 aa, Borrelia afzelii
LTSPVVAES

SEQ ID NO: 49930 - protein, 9 aa, Borrelia afzelii
TSPVVAESP

SEQ ID NO: 49931 - protein, 9 aa, Borrelia afzelii
SPVVAESPK

SEQ ID NO: 49932 - protein, 9 aa, Borrelia afzelii
PVVAESPKK

SEQ ID NO: 49933 - protein, 9 aa, Borrelia afzelii
VVAESPKKP

SEQ ID NO: 49934 - protein, 10 aa, Borrelia afzelii
MKKNTLSAIL

SEQ ID NO: 49935 - protein, 10 aa, Borrelia afzelii
KKNTLSAILM

SEQ ID NO: 49936 - protein, 10 aa, Borrelia afzelii
KNTLSAILMT

SEQ ID NO: 49937 - protein, 10 aa, Borrelia afzelii
NTLSAILMTL

SEQ ID NO: 49938 - protein, 10 aa, Borrelia afzelii
TLSAILMTLF

SEQ ID NO: 49939 - protein, 10 aa, Borrelia afzelii
LSAILMTLFL

SEQ ID NO: 49940 - protein, 10 aa, Borrelia afzelii
SAILMTLFLF

SEQ ID NO: 49941 - protein, 10 aa, Borrelia afzelii
AILMTLFLFI

SEQ ID NO: 49942 - protein, 10 aa, Borrelia afzelii
ILMTLFLFIS

SEQ ID NO: 49943 - protein, 10 aa, Borrelia afzelii
LMTLFLFISC

SEQ ID NO: 49944 - protein, 10 aa, Borrelia afzelii
MTLFLFISCN

SEQ ID NO: 49945 - protein, 10 aa, Borrelia afzelii
TLFLFISCNN

SEQ ID NO: 49946 - protein, 10 aa, Borrelia afzelii
LFLFISCNNS

SEQ ID NO: 49947 - protein, 10 aa, Borrelia afzelii
FLFISCNNSG

SEQ ID NO: 49948 - protein, 10 aa, Borrelia afzelii
LFISCNNSGK

SEQ ID NO: 49949 - protein, 10 aa, Borrelia afzelii
FISCNNSGKG

SEQ ID NO: 49950 - protein, 10 aa, Borrelia afzelii
ISCNNSGKGG

SEQ ID NO: 49951 - protein, 10 aa, Borrelia afzelii
SCNNSGKGGD

SEQ ID NO: 49952 - protein, 10 aa, Borrelia afzelii
CNNSGKGGDS

SEQ ID NO: 49953 - protein, 10 aa, Borrelia afzelii
NNSGKGGDSA

SEQ ID NO: 49954 - protein, 10 aa, Borrelia afzelii
NSGKGGDSAS

SEQ ID NO: 49955 - protein, 10 aa, Borrelia afzelii
SGKGGDSAST

SEQ ID NO: 49956 - protein, 10 aa, Borrelia afzelii
GKGGDSASTN

SEQ ID NO: 49957 - protein, 10 aa, Borrelia afzelii
KGGDSASTNP

SEQ ID NO: 49958 - protein, 10 aa, Borrelia afzelii
GGDSASTNPA

SEQ ID NO: 49959 - protein, 10 aa, Borrelia afzelii
GDSASTNPAD

SEQ ID NO: 49960 - protein, 10 aa, Borrelia afzelii
DSASTNPADE

SEQ ID NO: 49961 - protein, 10 aa, Borrelia afzelii
SASTNPADES

SEQ ID NO: 49962 - protein, 10 aa, Borrelia afzelii
ASTNPADESA

SEQ ID NO: 49963 - protein, 10 aa, Borrelia afzelii
STNPADESAK

SEQ ID NO: 49964 - protein, 10 aa, Borrelia afzelii
TNPADESAKG

SEQ ID NO: 49965 - protein, 10 aa, Borrelia afzelii
NPADESAKGP

SEQ ID NO: 49966 - protein, 10 aa, Borrelia afzelii
PADESAKGPN

SEQ ID NO: 49967 - protein, 10 aa, Borrelia afzelii
ADESAKGPNL

SEQ ID NO: 49968 - protein, 10 aa, Borrelia afzelii
DESAKGPNLT

SEQ ID NO: 49969 - protein, 10 aa, Borrelia afzelii
ESAKGPNLTE

SEQ ID NO: 49970 - protein, 10 aa, Borrelia afzelii
SAKGPNLTEI

SEQ ID NO: 49971 - protein, 10 aa, Borrelia afzelii
AKGPNLTEIS

SEQ ID NO: 49972 - protein, 10 aa, Borrelia afzelii
KGPNLTEISK

SEQ ID NO: 49973 - protein, 10 aa, Borrelia afzelii
GPNLTEISKK

SEQ ID NO: 49974 - protein, 10 aa, Borrelia afzelii
PNLTEISKKI

SEQ ID NO: 49975 - protein, 10 aa, Borrelia afzelii
NLTEISKKIT

SEQ ID NO: 49976 - protein, 10 aa, Borrelia afzelii
LTEISKKITD

SEQ ID NO: 49977 - protein, 10 aa, Borrelia afzelii
TEISKKITDS

SEQ ID NO: 49978 - protein, 10 aa, Borrelia afzelii
EISKKITDSN

SEQ ID NO: 49979 - protein, 10 aa, Borrelia afzelii
ISKKITDSNA

SEQ ID NO: 49980 - protein, 10 aa, Borrelia afzelii
SKKITDSNAF

SEQ ID NO: 49981 - protein, 10 aa, Borrelia afzelii
KKITDSNAFV

SEQ ID NO: 49982 - protein, 10 aa, Borrelia afzelii
KITDSNAFVL

SEQ ID NO: 49983 - protein, 10 aa, Borrelia afzelii
ITDSNAFVLA

SEQ ID NO: 49984 - protein, 10 aa, Borrelia afzelii
TDSNAFVLAV

SEQ ID NO: 49985 - protein, 10 aa, Borrelia afzelii
DSNAFVLAVK

SEQ ID NO: 49986 - protein, 10 aa, Borrelia afzelii
SNAFVLAVKE

SEQ ID NO: 49987 - protein, 10 aa, Borrelia afzelii
NAFVLAVKEV

SEQ ID NO: 49988 - protein, 10 aa, Borrelia afzelii
AFVLAVKEVE

SEQ ID NO: 49989 - protein, 10 aa, Borrelia afzelii
FVLAVKEVET

SEQ ID NO: 49990 - protein, 10 aa, Borrelia afzelii
VLAVKEVETL

SEQ ID NO: 49991 - protein, 10 aa, Borrelia afzelii
LAVKEVETLV

SEQ ID NO: 49992 - protein, 10 aa, Borrelia afzelii
AVKEVETLVS

SEQ ID NO: 49993 - protein, 10 aa, Borrelia afzelii
VKEVETLVSS

SEQ ID NO: 49994 - protein, 10 aa, Borrelia afzelii
KEVETLVSSI

SEQ ID NO: 49995 - protein, 10 aa, Borrelia afzelii
EVETLVSSID

SEQ ID NO: 49996 - protein, 10 aa, Borrelia afzelii
VETLVSSIDE

SEQ ID NO: 49997 - protein, 10 aa, Borrelia afzelii
ETLVSSIDEL

SEQ ID NO: 49998 - protein, 10 aa, Borrelia afzelii
TLVSSIDELA

SEQ ID NO: 49999 - protein, 10 aa, Borrelia afzelii
LVSSIDELAN

SEQ ID NO: 50000 - protein, 10 aa, Borrelia afzelii
VSSIDELANK

SEQ ID NO: 50001 - protein, 10 aa, Borrelia afzelii
SSIDELANKA

SEQ ID NO: 50002 - protein, 10 aa, Borrelia afzelii
SIDELANKAI

SEQ ID NO: 50003 - protein, 10 aa, Borrelia afzelii
IDELANKAIG

SEQ ID NO: 50004 - protein, 10 aa, Borrelia afzelii
DELANKAIGK

SEQ ID NO: 50005 - protein, 10 aa, Borrelia afzelii
ELANKAIGKK

SEQ ID NO: 50006 - protein, 10 aa, Borrelia afzelii
LANKAIGKKI

SEQ ID NO: 50007 - protein, 10 aa, Borrelia afzelii
ANKAIGKKIQ

SEQ ID NO: 50008 - protein, 10 aa, Borrelia afzelii
NKAIGKKIQQ

SEQ ID NO: 50009 - protein, 10 aa, Borrelia afzelii
KAIGKKIQQN

SEQ ID NO: 50010 - protein, 10 aa, Borrelia afzelii
AIGKKIQQNG

SEQ ID NO: 50011 - protein, 10 aa, Borrelia afzelii
IGKKIQQNGL

SEQ ID NO: 50012 - protein, 10 aa, Borrelia afzelii
GKKIQQNGLG

SEQ ID NO: 50013 - protein, 10 aa, Borrelia afzelii
KKIQQNGLGA

SEQ ID NO: 50014 - protein, 10 aa, Borrelia afzelii
KIQQNGLGAE

SEQ ID NO: 50015 - protein, 10 aa, Borrelia afzelii
IQQNGLGAEA

SEQ ID NO: 50016 - protein, 10 aa, Borrelia afzelii
QQNGLGAEAN

SEQ ID NO: 50017 - protein, 10 aa, Borrelia afzelii
QNGLGAEANR

SEQ ID NO: 50018 - protein, 10 aa, Borrelia afzelii
NGLGAEANRN

SEQ ID NO: 50019 - protein, 10 aa, Borrelia afzelii
GLGAEANRNE

SEQ ID NO: 50020 - protein, 10 aa, Borrelia afzelii
LGAEANRNES

SEQ ID NO: 50021 - protein, 10 aa, Borrelia afzelii
GAEANRNESL

SEQ ID NO: 50022 - protein, 10 aa, Borrelia afzelii
AEANRNESLL

SEQ ID NO: 50023 - protein, 10 aa, Borrelia afzelii
EANRNESLLA

SEQ ID NO: 50024 - protein, 10 aa, Borrelia afzelii
ANRNESLLAG

SEQ ID NO: 50025 - protein, 10 aa, Borrelia afzelii
NRNESLLAGV

SEQ ID NO: 50026 - protein, 10 aa, Borrelia afzelii
RNESLLAGVH

SEQ ID NO: 50027 - protein, 10 aa, Borrelia afzelii
NESLLAGVHE

SEQ ID NO: 50028 - protein, 10 aa, Borrelia afzelii
ESLLAGVHEI

SEQ ID NO: 50029 - protein, 10 aa, Borrelia afzelii
SLLAGVHEIS

SEQ ID NO: 50030 - protein, 10 aa, Borrelia afzelii
LLAGVHEIST

SEQ ID NO: 50031 - protein, 10 aa, Borrelia afzelii
LAGVHEISTL

SEQ ID NO: 50032 - protein, 10 aa, Borrelia afzelii
AGVHEISTLI

SEQ ID NO: 50033 - protein, 10 aa, Borrelia afzelii
GVHEISTLIT

SEQ ID NO: 50034 - protein, 10 aa, Borrelia afzelii
VHEISTLITE

SEQ ID NO: 50035 - protein, 10 aa, Borrelia afzelii
HEISTLITEK

SEQ ID NO: 50036 - protein, 10 aa, Borrelia afzelii
EISTLITEKL

SEQ ID NO: 50037 - protein, 10 aa, Borrelia afzelii
ISTLITEKLS

SEQ ID NO: 50038 - protein, 10 aa, Borrelia afzelii
STLITEKLSK

SEQ ID NO: 50039 - protein, 10 aa, Borrelia afzelii
TLITEKLSKL

SEQ ID NO: 50040 - protein, 10 aa, Borrelia afzelii
LITEKLSKLK

SEQ ID NO: 50041 - protein, 10 aa, Borrelia afzelii
ITEKLSKLKN

SEQ ID NO: 50042 - protein, 10 aa, Borrelia afzelii
TEKLSKLKNS

SEQ ID NO: 50043 - protein, 10 aa, Borrelia afzelii
EKLSKLKNSG

SEQ ID NO: 50044 - protein, 10 aa, Borrelia afzelii
KLSKLKNSGE

SEQ ID NO: 50045 - protein, 10 aa, Borrelia afzelii
LSKLKNSGEL

SEQ ID NO: 50046 - protein, 10 aa, Borrelia afzelii
SKLKNSGELK

SEQ ID NO: 50047 - protein, 10 aa, Borrelia afzelii
KLKNSGELKA

SEQ ID NO: 50048 - protein, 10 aa, Borrelia afzelii
LKNSGELKAK

SEQ ID NO: 50049 - protein, 10 aa, Borrelia afzelii
KNSGELKAKI

SEQ ID NO: 50050 - protein, 10 aa, Borrelia afzelii
NSGELKAKIE

SEQ ID NO: 50051 - protein, 10 aa, Borrelia afzelii
SGELKAKIED

SEQ ID NO: 50052 - protein, 10 aa, Borrelia afzelii
GELKAKIEDA

SEQ ID NO: 50053 - protein, 10 aa, Borrelia afzelii
ELKAKIEDAK

SEQ ID NO: 50054 - protein, 10 aa, Borrelia afzelii
LKAKIEDAKK

SEQ ID NO: 50055 - protein, 10 aa, Borrelia afzelii
KAKIEDAKKC

SEQ ID NO: 50056 - protein, 10 aa, Borrelia afzelii
AKIEDAKKCS

SEQ ID NO: 50057 - protein, 10 aa, Borrelia afzelii
KIEDAKKCSE

SEQ ID NO: 50058 - protein, 10 aa, Borrelia afzelii
IEDAKKCSEE

SEQ ID NO: 50059 - protein, 10 aa, Borrelia afzelii
EDAKKCSEEF

SEQ ID NO: 50060 - protein, 10 aa, Borrelia afzelii
DAKKCSEEFT

SEQ ID NO: 50061 - protein, 10 aa, Borrelia afzelii
AKKCSEEFTN

SEQ ID NO: 50062 - protein, 10 aa, Borrelia afzelii
KKCSEEFTNK

SEQ ID NO: 50063 - protein, 10 aa, Borrelia afzelii
KCSEEFTNKL

SEQ ID NO: 50064 - protein, 10 aa, Borrelia afzelii
CSEEFTNKLR

SEQ ID NO: 50065 - protein, 10 aa, Borrelia afzelii
SEEFTNKLRV

SEQ ID NO: 50066 - protein, 10 aa, Borrelia afzelii
EEFTNKLRVS

SEQ ID NO: 50067 - protein, 10 aa, Borrelia afzelii
EFTNKLRVSH

SEQ ID NO: 50068 - protein, 10 aa, Borrelia afzelii
FTNKLRVSHA

SEQ ID NO: 50069 - protein, 10 aa, Borrelia afzelii
TNKLRVSHAD

SEQ ID NO: 50070 - protein, 10 aa, Borrelia afzelii
NKLRVSHADL

SEQ ID NO: 50071 - protein, 10 aa, Borrelia afzelii
KLRVSHADLG

SEQ ID NO: 50072 - protein, 10 aa, Borrelia afzelii
LRVSHADLGK

SEQ ID NO: 50073 - protein, 10 aa, Borrelia afzelii
RVSHADLGKQ

SEQ ID NO: 50074 - protein, 10 aa, Borrelia afzelii
VSHADLGKQG

SEQ ID NO: 50075 - protein, 10 aa, Borrelia afzelii
SHADLGKQGV

SEQ ID NO: 50076 - protein, 10 aa, Borrelia afzelii
HADLGKQGVN

SEQ ID NO: 50077 - protein, 10 aa, Borrelia afzelii
ADLGKQGVND

SEQ ID NO: 50078 - protein, 10 aa, Borrelia afzelii
DLGKQGVNDD

SEQ ID NO: 50079 - protein, 10 aa, Borrelia afzelii
LGKQGVNDDD

SEQ ID NO: 50080 - protein, 10 aa, Borrelia afzelii
GKQGVNDDDA

SEQ ID NO: 50081 - protein, 10 aa, Borrelia afzelii
KQGVNDDDAK

SEQ ID NO: 50082 - protein, 10 aa, Borrelia afzelii
QGVNDDDAKK

SEQ ID NO: 50083 - protein, 10 aa, Borrelia afzelii
GVNDDDAKKA

SEQ ID NO: 50084 - protein, 10 aa, Borrelia afzelii
VNDDDAKKAI

SEQ ID NO: 50085 - protein, 10 aa, Borrelia afzelii
NDDDAKKAIL

SEQ ID NO: 50086 - protein, 10 aa, Borrelia afzelii
DDDAKKAILK

SEQ ID NO: 50087 - protein, 10 aa, Borrelia afzelii
DDAKKAILKT

SEQ ID NO: 50088 - protein, 10 aa, Borrelia afzelii
DAKKAILKTN

SEQ ID NO: 50089 - protein, 10 aa, Borrelia afzelii
AKKAILKTNA

SEQ ID NO: 50090 - protein, 10 aa, Borrelia afzelii
KKAILKTNAD

SEQ ID NO: 50091 - protein, 10 aa, Borrelia afzelii
KAILKTNADK

SEQ ID NO: 50092 - protein, 10 aa, Borrelia afzelii
AILKTNADKT

SEQ ID NO: 50093 - protein, 10 aa, Borrelia afzelii
ILKTNADKTK

SEQ ID NO: 50094 - protein, 10 aa, Borrelia afzelii
LKTNADKTKG

SEQ ID NO: 50095 - protein, 10 aa, Borrelia afzelii
KTNADKTKGA

SEQ ID NO: 50096 - protein, 10 aa, Borrelia afzelii
TNADKTKGAE

SEQ ID NO: 50097 - protein, 10 aa, Borrelia afzelii
NADKTKGAEE

SEQ ID NO: 50098 - protein, 10 aa, Borrelia afzelii
ADKTKGAEEL

SEQ ID NO: 50099 - protein, 10 aa, Borrelia afzelii
DKTKGAEELG

SEQ ID NO: 50100 - protein, 10 aa, Borrelia afzelii
KTKGAEELGK

SEQ ID NO: 50101 - protein, 10 aa, Borrelia afzelii
TKGAEELGKL

SEQ ID NO: 50102 - protein, 10 aa, Borrelia afzelii
KGAEELGKLF

SEQ ID NO: 50103 - protein, 10 aa, Borrelia afzelii
GAEELGKLFK

SEQ ID NO: 50104 - protein, 10 aa, Borrelia afzelii
AEELGKLFKS

SEQ ID NO: 50105 - protein, 10 aa, Borrelia afzelii
EELGKLFKSV

SEQ ID NO: 50106 - protein, 10 aa, Borrelia afzelii
ELGKLFKSVE

SEQ ID NO: 50107 - protein, 10 aa, Borrelia afzelii
LGKLFKSVEG

SEQ ID NO: 50108 - protein, 10 aa, Borrelia afzelii
GKLFKSVEGL

SEQ ID NO: 50109 - protein, 10 aa, Borrelia afzelii
KLFKSVEGLV

SEQ ID NO: 50110 - protein, 10 aa, Borrelia afzelii
LFKSVEGLVK

SEQ ID NO: 50111 - protein, 10 aa, Borrelia afzelii
FKSVEGLVKA

SEQ ID NO: 50112 - protein, 10 aa, Borrelia afzelii
KSVEGLVKAA

SEQ ID NO: 50113 - protein, 10 aa, Borrelia afzelii
SVEGLVKAAQ

SEQ ID NO: 50114 - protein, 10 aa, Borrelia afzelii
VEGLVKAAQE

SEQ ID NO: 50115 - protein, 10 aa, Borrelia afzelii
EGLVKAAQEA

SEQ ID NO: 50116 - protein, 10 aa, Borrelia afzelii
GLVKAAQEAL

SEQ ID NO: 50117 - protein, 10 aa, Borrelia afzelii
LVKAAQEALT

SEQ ID NO: 50118 - protein, 10 aa, Borrelia afzelii
VKAAQEALTN

SEQ ID NO: 50119 - protein, 10 aa, Borrelia afzelii
KAAQEALTNS

SEQ ID NO: 50120 - protein, 10 aa, Borrelia afzelii
AAQEALTNSV

SEQ ID NO: 50121 - protein, 10 aa, Borrelia afzelii
AQEALTNSVK

SEQ ID NO: 50122 - protein, 10 aa, Borrelia afzelii
QEALTNSVKE

SEQ ID NO: 50123 - protein, 10 aa, Borrelia afzelii
EALTNSVKEL

SEQ ID NO: 50124 - protein, 10 aa, Borrelia afzelii
ALTNSVKELT

SEQ ID NO: 50125 - protein, 10 aa, Borrelia afzelii
LTNSVKELTS

SEQ ID NO: 50126 - protein, 10 aa, Borrelia afzelii
TNSVKELTSP

SEQ ID NO: 50127 - protein, 10 aa, Borrelia afzelii
NSVKELTSPV

SEQ ID NO: 50128 - protein, 10 aa, Borrelia afzelii
SVKELTSPVV

SEQ ID NO: 50129 - protein, 10 aa, Borrelia afzelii
VKELTSPVVA

SEQ ID NO: 50130 - protein, 10 aa, Borrelia afzelii
KELTSPVVAE

SEQ ID NO: 50131 - protein, 10 aa, Borrelia afzelii
ELTSPVVAES

SEQ ID NO: 50132 - protein, 10 aa, Borrelia afzelii
LTSPVVAESP

SEQ ID NO: 50133 - protein, 10 aa, Borrelia afzelii
TSPVVAESPK

SEQ ID NO: 50134 - protein, 10 aa, Borrelia afzelii
SPVVAESPKK

SEQ ID NO: 50135 - protein, 10 aa, Borrelia afzelii
PVVAESPKKP

SEQ ID NO: 50136 - protein, 11 aa, Borrelia afzelii
MKKNTLSAILM

SEQ ID NO: 50137 - protein, 11 aa, Borrelia afzelii
KKNTLSAILMT

SEQ ID NO: 50138 - protein, 11 aa, Borrelia afzelii
KNTLSAILMTL

SEQ ID NO: 50139 - protein, 11 aa, Borrelia afzelii
NTLSAILMTLF

SEQ ID NO: 50140 - protein, 11 aa, Borrelia afzelii
TLSAILMTLFL

SEQ ID NO: 50141 - protein, 11 aa, Borrelia afzelii
LSAILMTLFLF

SEQ ID NO: 50142 - protein, 11 aa, Borrelia afzelii
SAILMTLFLFI

SEQ ID NO: 50143 - protein, 11 aa, Borrelia afzelii
AILMTLFLFIS

SEQ ID NO: 50144 - protein, 11 aa, Borrelia afzelii
ILMTLFLFISC

SEQ ID NO: 50145 - protein, 11 aa, Borrelia afzelii
LMTLFLFISCN

SEQ ID NO: 50146 - protein, 11 aa, Borrelia afzelii
MTLFLFISCNN

SEQ ID NO: 50147 - protein, 11 aa, Borrelia afzelii
TLFLFISCNNS

SEQ ID NO: 50148 - protein, 11 aa, Borrelia afzelii
LFLFISCNNSG

SEQ ID NO: 50149 - protein, 11 aa, Borrelia afzelii
FLFISCNNSGK

SEQ ID NO: 50150 - protein, 11 aa, Borrelia afzelii
LFISCNNSGKG

SEQ ID NO: 50151 - protein, 11 aa, Borrelia afzelii
FISCNNSGKGG

SEQ ID NO: 50152 - protein, 11 aa, Borrelia afzelii
ISCNNSGKGGD

SEQ ID NO: 50153 - protein, 11 aa, Borrelia afzelii
SCNNSGKGGDS

SEQ ID NO: 50154 - protein, 11 aa, Borrelia afzelii
CNNSGKGGDSA

SEQ ID NO: 50155 - protein, 11 aa, Borrelia afzelii
NNSGKGGDSAS

SEQ ID NO: 50156 - protein, 11 aa, Borrelia afzelii
NSGKGGDSAST

SEQ ID NO: 50157 - protein, 11 aa, Borrelia afzelii
SGKGGDSASTN

SEQ ID NO: 50158 - protein, 11 aa, Borrelia afzelii
GKGGDSASTNP

SEQ ID NO: 50159 - protein, 11 aa, Borrelia afzelii
KGGDSASTNPA

SEQ ID NO: 50160 - protein, 11 aa, Borrelia afzelii
GGDSASTNPAD

SEQ ID NO: 50161 - protein, 11 aa, Borrelia afzelii
GDSASTNPADE

SEQ ID NO: 50162 - protein, 11 aa, Borrelia afzelii
DSASTNPADES

SEQ ID NO: 50163 - protein, 11 aa, Borrelia afzelii
SASTNPADESA

SEQ ID NO: 50164 - protein, 11 aa, Borrelia afzelii
ASTNPADESAK

SEQ ID NO: 50165 - protein, 11 aa, Borrelia afzelii
STNPADESAKG

SEQ ID NO: 50166 - protein, 11 aa, Borrelia afzelii
TNPADESAKGP

SEQ ID NO: 50167 - protein, 11 aa, Borrelia afzelii
NPADESAKGPN

SEQ ID NO: 50168 - protein, 11 aa, Borrelia afzelii
PADESAKGPNL

SEQ ID NO: 50169 - protein, 11 aa, Borrelia afzelii
ADESAKGPNLT

SEQ ID NO: 50170 - protein, 11 aa, Borrelia afzelii
DESAKGPNLTE

SEQ ID NO: 50171 - protein, 11 aa, Borrelia afzelii
ESAKGPNLTEI

SEQ ID NO: 50172 - protein, 11 aa, Borrelia afzelii
SAKGPNLTEIS

SEQ ID NO: 50173 - protein, 11 aa, Borrelia afzelii
AKGPNLTEISK

SEQ ID NO: 50174 - protein, 11 aa, Borrelia afzelii
KGPNLTEISKK

SEQ ID NO: 50175 - protein, 11 aa, Borrelia afzelii
GPNLTEISKKI

SEQ ID NO: 50176 - protein, 11 aa, Borrelia afzelii
PNLTEISKKIT

SEQ ID NO: 50177 - protein, 11 aa, Borrelia afzelii
NLTEISKKITD

SEQ ID NO: 50178 - protein, 11 aa, Borrelia afzelii
LTEISKKITDS

SEQ ID NO: 50179 - protein, 11 aa, Borrelia afzelii
TEISKKITDSN

SEQ ID NO: 50180 - protein, 11 aa, Borrelia afzelii
EISKKITDSNA

SEQ ID NO: 50181 - protein, 11 aa, Borrelia afzelii
ISKKITDSNAF

SEQ ID NO: 50182 - protein, 11 aa, Borrelia afzelii
SKKITDSNAFV

SEQ ID NO: 50183 - protein, 11 aa, Borrelia afzelii
KKITDSNAFVL

SEQ ID NO: 50184 - protein, 11 aa, Borrelia afzelii
KITDSNAFVLA

SEQ ID NO: 50185 - protein, 11 aa, Borrelia afzelii
ITDSNAFVLAV

SEQ ID NO: 50186 - protein, 11 aa, Borrelia afzelii
TDSNAFVLAVK

SEQ ID NO: 50187 - protein, 11 aa, Borrelia afzelii
DSNAFVLAVKE

SEQ ID NO: 50188 - protein, 11 aa, Borrelia afzelii
SNAFVLAVKEV

SEQ ID NO: 50189 - protein, 11 aa, Borrelia afzelii
NAFVLAVKEVE

SEQ ID NO: 50190 - protein, 11 aa, Borrelia afzelii
AFVLAVKEVET

SEQ ID NO: 50191 - protein, 11 aa, Borrelia afzelii
FVLAVKEVETL

SEQ ID NO: 50192 - protein, 11 aa, Borrelia afzelii
VLAVKEVETLV

SEQ ID NO: 50193 - protein, 11 aa, Borrelia afzelii
LAVKEVETLVS

SEQ ID NO: 50194 - protein, 11 aa, Borrelia afzelii
AVKEVETLVSS

SEQ ID NO: 50195 - protein, 11 aa, Borrelia afzelii
VKEVETLVSSI

SEQ ID NO: 50196 - protein, 11 aa, Borrelia afzelii
KEVETLVSSID

SEQ ID NO: 50197 - protein, 11 aa, Borrelia afzelii
EVETLVSSIDE

SEQ ID NO: 50198 - protein, 11 aa, Borrelia afzelii
VETLVSSIDEL

SEQ ID NO: 50199 - protein, 11 aa, Borrelia afzelii
ETLVSSIDELA

SEQ ID NO: 50200 - protein, 11 aa, Borrelia afzelii
TLVSSIDELAN

SEQ ID NO: 50201 - protein, 11 aa, Borrelia afzelii
LVSSIDELANK

SEQ ID NO: 50202 - protein, 11 aa, Borrelia afzelii
VSSIDELANKA

SEQ ID NO: 50203 - protein, 11 aa, Borrelia afzelii
SSIDELANKAI

SEQ ID NO: 50204 - protein, 11 aa, Borrelia afzelii
SIDELANKAIG

SEQ ID NO: 50205 - protein, 11 aa, Borrelia afzelii
IDELANKAIGK

SEQ ID NO: 50206 - protein, 11 aa, Borrelia afzelii
DELANKAIGKK

SEQ ID NO: 50207 - protein, 11 aa, Borrelia afzelii
ELANKAIGKKI

SEQ ID NO: 50208 - protein, 11 aa, Borrelia afzelii
LANKAIGKKIQ

SEQ ID NO: 50209 - protein, 11 aa, Borrelia afzelii
ANKAIGKKIQQ

SEQ ID NO: 50210 - protein, 11 aa, Borrelia afzelii
NKAIGKKIQQN

SEQ ID NO: 50211 - protein, 11 aa, Borrelia afzelii
KAIGKKIQQNG

SEQ ID NO: 50212 - protein, 11 aa, Borrelia afzelii
AIGKKIQQNGL

SEQ ID NO: 50213 - protein, 11 aa, Borrelia afzelii
IGKKIQQNGLG

SEQ ID NO: 50214 - protein, 11 aa, Borrelia afzelii
GKKIQQNGLGA

SEQ ID NO: 50215 - protein, 11 aa, Borrelia afzelii
KKIQQNGLGAE

SEQ ID NO: 50216 - protein, 11 aa, Borrelia afzelii
KIQQNGLGAEA

SEQ ID NO: 50217 - protein, 11 aa, Borrelia afzelii
IQQNGLGAEAN

SEQ ID NO: 50218 - protein, 11 aa, Borrelia afzelii
QQNGLGAEANR

SEQ ID NO: 50219 - protein, 11 aa, Borrelia afzelii
QNGLGAEANRN

SEQ ID NO: 50220 - protein, 11 aa, Borrelia afzelii
NGLGAEANRNE

SEQ ID NO: 50221 - protein, 11 aa, Borrelia afzelii
GLGAEANRNES

SEQ ID NO: 50222 - protein, 11 aa, Borrelia afzelii
LGAEANRNESL

SEQ ID NO: 50223 - protein, 11 aa, Borrelia afzelii
GAEANRNESLL

SEQ ID NO: 50224 - protein, 11 aa, Borrelia afzelii
AEANRNESLLA

SEQ ID NO: 50225 - protein, 11 aa, Borrelia afzelii
EANRNESLLAG

SEQ ID NO: 50226 - protein, 11 aa, Borrelia afzelii
ANRNESLLAGV

SEQ ID NO: 50227 - protein, 11 aa, Borrelia afzelii
NRNESLLAGVH

SEQ ID NO: 50228 - protein, 11 aa, Borrelia afzelii
RNESLLAGVHE

SEQ ID NO: 50229 - protein, 11 aa, Borrelia afzelii
NESLLAGVHEI

SEQ ID NO: 50230 - protein, 11 aa, Borrelia afzelii
ESLLAGVHEIS

SEQ ID NO: 50231 - protein, 11 aa, Borrelia afzelii
SLLAGVHEIST

SEQ ID NO: 50232 - protein, 11 aa, Borrelia afzelii
LLAGVHEISTL

SEQ ID NO: 50233 - protein, 11 aa, Borrelia afzelii
LAGVHEISTLI

SEQ ID NO: 50234 - protein, 11 aa, Borrelia afzelii
AGVHEISTLIT

SEQ ID NO: 50235 - protein, 11 aa, Borrelia afzelii
GVHEISTLITE

SEQ ID NO: 50236 - protein, 11 aa, Borrelia afzelii
VHEISTLITEK

SEQ ID NO: 50237 - protein, 11 aa, Borrelia afzelii
HEISTLITEKL

SEQ ID NO: 50238 - protein, 11 aa, Borrelia afzelii
EISTLITEKLS

SEQ ID NO: 50239 - protein, 11 aa, Borrelia afzelii
ISTLITEKLSK

SEQ ID NO: 50240 - protein, 11 aa, Borrelia afzelii
STLITEKLSKL

SEQ ID NO: 50241 - protein, 11 aa, Borrelia afzelii
TLITEKLSKLK

SEQ ID NO: 50242 - protein, 11 aa, Borrelia afzelii
LITEKLSKLKN

SEQ ID NO: 50243 - protein, 11 aa, Borrelia afzelii
ITEKLSKLKNS

SEQ ID NO: 50244 - protein, 11 aa, Borrelia afzelii
TEKLSKLKNSG

SEQ ID NO: 50245 - protein, 11 aa, Borrelia afzelii
EKLSKLKNSGE

SEQ ID NO: 50246 - protein, 11 aa, Borrelia afzelii
KLSKLKNSGEL

SEQ ID NO: 50247 - protein, 11 aa, Borrelia afzelii
LSKLKNSGELK

SEQ ID NO: 50248 - protein, 11 aa, Borrelia afzelii
SKLKNSGELKA

SEQ ID NO: 50249 - protein, 11 aa, Borrelia afzelii
KLKNSGELKAK

SEQ ID NO: 50250 - protein, 11 aa, Borrelia afzelii
LKNSGELKAKI

SEQ ID NO: 50251 - protein, 11 aa, Borrelia afzelii
KNSGELKAKIE

SEQ ID NO: 50252 - protein, 11 aa, Borrelia afzelii
NSGELKAKIED

SEQ ID NO: 50253 - protein, 11 aa, Borrelia afzelii
SGELKAKIEDA

SEQ ID NO: 50254 - protein, 11 aa, Borrelia afzelii
GELKAKIEDAK

SEQ ID NO: 50255 - protein, 11 aa, Borrelia afzelii
ELKAKIEDAKK

SEQ ID NO: 50256 - protein, 11 aa, Borrelia afzelii
LKAKIEDAKKC

SEQ ID NO: 50257 - protein, 11 aa, Borrelia afzelii
KAKIEDAKKCS

SEQ ID NO: 50258 - protein, 11 aa, Borrelia afzelii
AKIEDAKKCSE

SEQ ID NO: 50259 - protein, 11 aa, Borrelia afzelii
KIEDAKKCSEE

SEQ ID NO: 50260 - protein, 11 aa, Borrelia afzelii
IEDAKKCSEEF

SEQ ID NO: 50261 - protein, 11 aa, Borrelia afzelii
EDAKKCSEEFT

SEQ ID NO: 50262 - protein, 11 aa, Borrelia afzelii
DAKKCSEEFTN

SEQ ID NO: 50263 - protein, 11 aa, Borrelia afzelii
AKKCSEEFTNK

SEQ ID NO: 50264 - protein, 11 aa, Borrelia afzelii
KKCSEEFTNKL

SEQ ID NO: 50265 - protein, 11 aa, Borrelia afzelii
KCSEEFTNKLR

SEQ ID NO: 50266 - protein, 11 aa, Borrelia afzelii
CSEEFTNKLRV

SEQ ID NO: 50267 - protein, 11 aa, Borrelia afzelii
SEEFTNKLRVS

SEQ ID NO: 50268 - protein, 11 aa, Borrelia afzelii
EEFTNKLRVSH

SEQ ID NO: 50269 - protein, 11 aa, Borrelia afzelii
EFTNKLRVSHA

SEQ ID NO: 50270 - protein, 11 aa, Borrelia afzelii
FTNKLRVSHAD

SEQ ID NO: 50271 - protein, 11 aa, Borrelia afzelii
TNKLRVSHADL

SEQ ID NO: 50272 - protein, 11 aa, Borrelia afzelii
NKLRVSHADLG

SEQ ID NO: 50273 - protein, 11 aa, Borrelia afzelii
KLRVSHADLGK

SEQ ID NO: 50274 - protein, 11 aa, Borrelia afzelii
LRVSHADLGKQ

SEQ ID NO: 50275 - protein, 11 aa, Borrelia afzelii
RVSHADLGKQG

SEQ ID NO: 50276 - protein, 11 aa, Borrelia afzelii
VSHADLGKQGV

SEQ ID NO: 50277 - protein, 11 aa, Borrelia afzelii
SHADLGKQGVN

SEQ ID NO: 50278 - protein, 11 aa, Borrelia afzelii
HADLGKQGVND

SEQ ID NO: 50279 - protein, 11 aa, Borrelia afzelii
ADLGKQGVNDD

SEQ ID NO: 50280 - protein, 11 aa, Borrelia afzelii
DLGKQGVNDDD

SEQ ID NO: 50281 - protein, 11 aa, Borrelia afzelii
LGKQGVNDDDA

SEQ ID NO: 50282 - protein, 11 aa, Borrelia afzelii
GKQGVNDDDAK

SEQ ID NO: 50283 - protein, 11 aa, Borrelia afzelii
KQGVNDDDAKK

SEQ ID NO: 50284 - protein, 11 aa, Borrelia afzelii
QGVNDDDAKKA

SEQ ID NO: 50285 - protein, 11 aa, Borrelia afzelii
GVNDDDAKKAI

SEQ ID NO: 50286 - protein, 11 aa, Borrelia afzelii
VNDDDAKKAIL

SEQ ID NO: 50287 - protein, 11 aa, Borrelia afzelii
NDDDAKKAILK

SEQ ID NO: 50288 - protein, 11 aa, Borrelia afzelii
DDDAKKAILKT

SEQ ID NO: 50289 - protein, 11 aa, Borrelia afzelii
DDAKKAILKTN

SEQ ID NO: 50290 - protein, 11 aa, Borrelia afzelii
DAKKAILKTNA

SEQ ID NO: 50291 - protein, 11 aa, Borrelia afzelii
AKKAILKTNAD

SEQ ID NO: 50292 - protein, 11 aa, Borrelia afzelii
KKAILKTNADK

SEQ ID NO: 50293 - protein, 11 aa, Borrelia afzelii
KAILKTNADKT

SEQ ID NO: 50294 - protein, 11 aa, Borrelia afzelii
AILKTNADKTK

SEQ ID NO: 50295 - protein, 11 aa, Borrelia afzelii
ILKTNADKTKG

SEQ ID NO: 50296 - protein, 11 aa, Borrelia afzelii
LKTNADKTKGA

SEQ ID NO: 50297 - protein, 11 aa, Borrelia afzelii
KTNADKTKGAE

SEQ ID NO: 50298 - protein, 11 aa, Borrelia afzelii
TNADKTKGAEE

SEQ ID NO: 50299 - protein, 11 aa, Borrelia afzelii
NADKTKGAEEL

SEQ ID NO: 50300 - protein, 11 aa, Borrelia afzelii
ADKTKGAEELG

SEQ ID NO: 50301 - protein, 11 aa, Borrelia afzelii
DKTKGAEELGK

SEQ ID NO: 50302 - protein, 11 aa, Borrelia afzelii
KTKGAEELGKL

SEQ ID NO: 50303 - protein, 11 aa, Borrelia afzelii
TKGAEELGKLF

SEQ ID NO: 50304 - protein, 11 aa, Borrelia afzelii
KGAEELGKLFK

SEQ ID NO: 50305 - protein, 11 aa, Borrelia afzelii
GAEELGKLFKS

SEQ ID NO: 50306 - protein, 11 aa, Borrelia afzelii
AEELGKLFKSV

SEQ ID NO: 50307 - protein, 11 aa, Borrelia afzelii
EELGKLFKSVE

SEQ ID NO: 50308 - protein, 11 aa, Borrelia afzelii
ELGKLFKSVEG

SEQ ID NO: 50309 - protein, 11 aa, Borrelia afzelii
LGKLFKSVEGL

SEQ ID NO: 50310 - protein, 11 aa, Borrelia afzelii
GKLFKSVEGLV

SEQ ID NO: 50311 - protein, 11 aa, Borrelia afzelii
KLFKSVEGLVK

SEQ ID NO: 50312 - protein, 11 aa, Borrelia afzelii
LFKSVEGLVKA

SEQ ID NO: 50313 - protein, 11 aa, Borrelia afzelii
FKSVEGLVKAA

SEQ ID NO: 50314 - protein, 11 aa, Borrelia afzelii
KSVEGLVKAAQ

SEQ ID NO: 50315 - protein, 11 aa, Borrelia afzelii
SVEGLVKAAQE

SEQ ID NO: 50316 - protein, 11 aa, Borrelia afzelii
VEGLVKAAQEA

SEQ ID NO: 50317 - protein, 11 aa, Borrelia afzelii
EGLVKAAQEAL

SEQ ID NO: 50318 - protein, 11 aa, Borrelia afzelii
GLVKAAQEALT

SEQ ID NO: 50319 - protein, 11 aa, Borrelia afzelii
LVKAAQEALTN

SEQ ID NO: 50320 - protein, 11 aa, Borrelia afzelii
VKAAQEALTNS

SEQ ID NO: 50321 - protein, 11 aa, Borrelia afzelii
KAAQEALTNSV

SEQ ID NO: 50322 - protein, 11 aa, Borrelia afzelii
AAQEALTNSVK

SEQ ID NO: 50323 - protein, 11 aa, Borrelia afzelii
AQEALTNSVKE

SEQ ID NO: 50324 - protein, 11 aa, Borrelia afzelii
QEALTNSVKEL

SEQ ID NO: 50325 - protein, 11 aa, Borrelia afzelii
EALTNSVKELT

SEQ ID NO: 50326 - protein, 11 aa, Borrelia afzelii
ALTNSVKELTS

SEQ ID NO: 50327 - protein, 11 aa, Borrelia afzelii
LTNSVKELTSP

SEQ ID NO: 50328 - protein, 11 aa, Borrelia afzelii
TNSVKELTSPV

SEQ ID NO: 50329 - protein, 11 aa, Borrelia afzelii
NSVKELTSPVV

SEQ ID NO: 50330 - protein, 11 aa, Borrelia afzelii
SVKELTSPVVA

SEQ ID NO: 50331 - protein, 11 aa, Borrelia afzelii
VKELTSPVVAE

SEQ ID NO: 50332 - protein, 11 aa, Borrelia afzelii
KELTSPVVAES

SEQ ID NO: 50333 - protein, 11 aa, Borrelia afzelii
ELTSPVVAESP

SEQ ID NO: 50334 - protein, 11 aa, Borrelia afzelii
LTSPVVAESPK

SEQ ID NO: 50335 - protein, 11 aa, Borrelia afzelii
TSPVVAESPKK

SEQ ID NO: 50336 - protein, 11 aa, Borrelia afzelii
SPVVAESPKKP

SEQ ID NO: 50337 - protein, 13 aa, Borrelia afzelii
MKKNTLSAILMTL

SEQ ID NO: 50338 - protein, 13 aa, Borrelia afzelii
KKNTLSAILMTLF

SEQ ID NO: 50339 - protein, 13 aa, Borrelia afzelii
KNTLSAILMTLFL

SEQ ID NO: 50340 - protein, 13 aa, Borrelia afzelii
NTLSAILMTLFLF

SEQ ID NO: 50341 - protein, 13 aa, Borrelia afzelii
TLSAILMTLFLFI

SEQ ID NO: 50342 - protein, 13 aa, Borrelia afzelii
LSAILMTLFLFIS

SEQ ID NO: 50343 - protein, 13 aa, Borrelia afzelii
SAILMTLFLFISC

SEQ ID NO: 50344 - protein, 13 aa, Borrelia afzelii
AILMTLFLFISCN

SEQ ID NO: 50345 - protein, 13 aa, Borrelia afzelii
ILMTLFLFISCNN

SEQ ID NO: 50346 - protein, 13 aa, Borrelia afzelii
LMTLFLFISCNNS

SEQ ID NO: 50347 - protein, 13 aa, Borrelia afzelii
MTLFLFISCNNSG

SEQ ID NO: 50348 - protein, 13 aa, Borrelia afzelii
TLFLFISCNNSGK

SEQ ID NO: 50349 - protein, 13 aa, Borrelia afzelii
LFLFISCNNSGKG

SEQ ID NO: 50350 - protein, 13 aa, Borrelia afzelii
FLFISCNNSGKGG

SEQ ID NO: 50351 - protein, 13 aa, Borrelia afzelii
LFISCNNSGKGGD

SEQ ID NO: 50352 - protein, 13 aa, Borrelia afzelii
FISCNNSGKGGDS

SEQ ID NO: 50353 - protein, 13 aa, Borrelia afzelii
ISCNNSGKGGDSA

SEQ ID NO: 50354 - protein, 13 aa, Borrelia afzelii
SCNNSGKGGDSAS

SEQ ID NO: 50355 - protein, 13 aa, Borrelia afzelii
CNNSGKGGDSAST

SEQ ID NO: 50356 - protein, 13 aa, Borrelia afzelii
NNSGKGGDSASTN

SEQ ID NO: 50357 - protein, 13 aa, Borrelia afzelii
NSGKGGDSASTNP

SEQ ID NO: 50358 - protein, 13 aa, Borrelia afzelii
SGKGGDSASTNPA

SEQ ID NO: 50359 - protein, 13 aa, Borrelia afzelii
GKGGDSASTNPAD

SEQ ID NO: 50360 - protein, 13 aa, Borrelia afzelii
KGGDSASTNPADE

SEQ ID NO: 50361 - protein, 13 aa, Borrelia afzelii
GGDSASTNPADES

SEQ ID NO: 50362 - protein, 13 aa, Borrelia afzelii
GDSASTNPADESA

SEQ ID NO: 50363 - protein, 13 aa, Borrelia afzelii
DSASTNPADESAK

SEQ ID NO: 50364 - protein, 13 aa, Borrelia afzelii
SASTNPADESAKG

SEQ ID NO: 50365 - protein, 13 aa, Borrelia afzelii
ASTNPADESAKGP

SEQ ID NO: 50366 - protein, 13 aa, Borrelia afzelii
STNPADESAKGPN

SEQ ID NO: 50367 - protein, 13 aa, Borrelia afzelii
TNPADESAKGPNL

SEQ ID NO: 50368 - protein, 13 aa, Borrelia afzelii
NPADESAKGPNLT

SEQ ID NO: 50369 - protein, 13 aa, Borrelia afzelii
PADESAKGPNLTE

SEQ ID NO: 50370 - protein, 13 aa, Borrelia afzelii
ADESAKGPNLTEI

SEQ ID NO: 50371 - protein, 13 aa, Borrelia afzelii
DESAKGPNLTEIS

SEQ ID NO: 50372 - protein, 13 aa, Borrelia afzelii
ESAKGPNLTEISK

SEQ ID NO: 50373 - protein, 13 aa, Borrelia afzelii
SAKGPNLTEISKK

SEQ ID NO: 50374 - protein, 13 aa, Borrelia afzelii
AKGPNLTEISKKI

SEQ ID NO: 50375 - protein, 13 aa, Borrelia afzelii
KGPNLTEISKKIT

SEQ ID NO: 50376 - protein, 13 aa, Borrelia afzelii
GPNLTEISKKITD

SEQ ID NO: 50377 - protein, 13 aa, Borrelia afzelii
PNLTEISKKITDS

SEQ ID NO: 50378 - protein, 13 aa, Borrelia afzelii
NLTEISKKITDSN

SEQ ID NO: 50379 - protein, 13 aa, Borrelia afzelii
LTEISKKITDSNA

SEQ ID NO: 50380 - protein, 13 aa, Borrelia afzelii
TEISKKITDSNAF

SEQ ID NO: 50381 - protein, 13 aa, Borrelia afzelii
EISKKITDSNAFV

SEQ ID NO: 50382 - protein, 13 aa, Borrelia afzelii
ISKKITDSNAFVL

SEQ ID NO: 50383 - protein, 13 aa, Borrelia afzelii
SKKITDSNAFVLA

SEQ ID NO: 50384 - protein, 13 aa, Borrelia afzelii
KKITDSNAFVLAV

SEQ ID NO: 50385 - protein, 13 aa, Borrelia afzelii
KITDSNAFVLAVK

SEQ ID NO: 50386 - protein, 13 aa, Borrelia afzelii
ITDSNAFVLAVKE

SEQ ID NO: 50387 - protein, 13 aa, Borrelia afzelii
TDSNAFVLAVKEV

SEQ ID NO: 50388 - protein, 13 aa, Borrelia afzelii
DSNAFVLAVKEVE

SEQ ID NO: 50389 - protein, 13 aa, Borrelia afzelii
SNAFVLAVKEVET

SEQ ID NO: 50390 - protein, 13 aa, Borrelia afzelii
NAFVLAVKEVETL

SEQ ID NO: 50391 - protein, 13 aa, Borrelia afzelii
AFVLAVKEVETLV

SEQ ID NO: 50392 - protein, 13 aa, Borrelia afzelii
FVLAVKEVETLVS

SEQ ID NO: 50393 - protein, 13 aa, Borrelia afzelii
VLAVKEVETLVSS

SEQ ID NO: 50394 - protein, 13 aa, Borrelia afzelii
LAVKEVETLVSSI

SEQ ID NO: 50395 - protein, 13 aa, Borrelia afzelii
AVKEVETLVSSID

SEQ ID NO: 50396 - protein, 13 aa, Borrelia afzelii
VKEVETLVSSIDE

SEQ ID NO: 50397 - protein, 13 aa, Borrelia afzelii
KEVETLVSSIDEL

SEQ ID NO: 50398 - protein, 13 aa, Borrelia afzelii
EVETLVSSIDELA

SEQ ID NO: 50399 - protein, 13 aa, Borrelia afzelii
VETLVSSIDELAN

SEQ ID NO: 50400 - protein, 13 aa, Borrelia afzelii
ETLVSSIDELANK

SEQ ID NO: 50401 - protein, 13 aa, Borrelia afzelii
TLVSSIDELANKA

SEQ ID NO: 50402 - protein, 13 aa, Borrelia afzelii
LVSSIDELANKAI

SEQ ID NO: 50403 - protein, 13 aa, Borrelia afzelii
VSSIDELANKAIG

SEQ ID NO: 50404 - protein, 13 aa, Borrelia afzelii
SSIDELANKAIGK

SEQ ID NO: 50405 - protein, 13 aa, Borrelia afzelii
SIDELANKAIGKK

SEQ ID NO: 50406 - protein, 13 aa, Borrelia afzelii
IDELANKAIGKKI

SEQ ID NO: 50407 - protein, 13 aa, Borrelia afzelii
DELANKAIGKKIQ

SEQ ID NO: 50408 - protein, 13 aa, Borrelia afzelii
ELANKAIGKKIQQ

SEQ ID NO: 50409 - protein, 13 aa, Borrelia afzelii
LANKAIGKKIQQN

SEQ ID NO: 50410 - protein, 13 aa, Borrelia afzelii
ANKAIGKKIQQNG

SEQ ID NO: 50411 - protein, 13 aa, Borrelia afzelii
NKAIGKKIQQNGL

SEQ ID NO: 50412 - protein, 13 aa, Borrelia afzelii
KAIGKKIQQNGLG

SEQ ID NO: 50413 - protein, 13 aa, Borrelia afzelii
AIGKKIQQNGLGA

SEQ ID NO: 50414 - protein, 13 aa, Borrelia afzelii
IGKKIQQNGLGAE

SEQ ID NO: 50415 - protein, 13 aa, Borrelia afzelii
GKKIQQNGLGAEA

SEQ ID NO: 50416 - protein, 13 aa, Borrelia afzelii
KKIQQNGLGAEAN

SEQ ID NO: 50417 - protein, 13 aa, Borrelia afzelii
KIQQNGLGAEANR

SEQ ID NO: 50418 - protein, 13 aa, Borrelia afzelii
IQQNGLGAEANRN

SEQ ID NO: 50419 - protein, 13 aa, Borrelia afzelii
QQNGLGAEANRNE

SEQ ID NO: 50420 - protein, 13 aa, Borrelia afzelii
QNGLGAEANRNES

SEQ ID NO: 50421 - protein, 13 aa, Borrelia afzelii
NGLGAEANRNESL

SEQ ID NO: 50422 - protein, 13 aa, Borrelia afzelii
GLGAEANRNESLL

SEQ ID NO: 50423 - protein, 13 aa, Borrelia afzelii
LGAEANRNESLLA

SEQ ID NO: 50424 - protein, 13 aa, Borrelia afzelii
GAEANRNESLLAG

SEQ ID NO: 50425 - protein, 13 aa, Borrelia afzelii
AEANRNESLLAGV

SEQ ID NO: 50426 - protein, 13 aa, Borrelia afzelii
EANRNESLLAGVH

SEQ ID NO: 50427 - protein, 13 aa, Borrelia afzelii
ANRNESLLAGVHE

SEQ ID NO: 50428 - protein, 13 aa, Borrelia afzelii
NRNESLLAGVHEI

SEQ ID NO: 50429 - protein, 13 aa, Borrelia afzelii
RNESLLAGVHEIS

SEQ ID NO: 50430 - protein, 13 aa, Borrelia afzelii
NESLLAGVHEIST

SEQ ID NO: 50431 - protein, 13 aa, Borrelia afzelii
ESLLAGVHEISTL

SEQ ID NO: 50432 - protein, 13 aa, Borrelia afzelii
SLLAGVHEISTLI

SEQ ID NO: 50433 - protein, 13 aa, Borrelia afzelii
LLAGVHEISTLIT

SEQ ID NO: 50434 - protein, 13 aa, Borrelia afzelii
LAGVHEISTLITE

SEQ ID NO: 50435 - protein, 13 aa, Borrelia afzelii
AGVHEISTLITEK

SEQ ID NO: 50436 - protein, 13 aa, Borrelia afzelii
GVHEISTLITEKL

SEQ ID NO: 50437 - protein, 13 aa, Borrelia afzelii
VHEISTLITEKLS

SEQ ID NO: 50438 - protein, 13 aa, Borrelia afzelii
HEISTLITEKLSK

SEQ ID NO: 50439 - protein, 13 aa, Borrelia afzelii
EISTLITEKLSKL

SEQ ID NO: 50440 - protein, 13 aa, Borrelia afzelii
ISTLITEKLSKLK

SEQ ID NO: 50441 - protein, 13 aa, Borrelia afzelii
STLITEKLSKLKN

SEQ ID NO: 50442 - protein, 13 aa, Borrelia afzelii
TLITEKLSKLKNS

SEQ ID NO: 50443 - protein, 13 aa, Borrelia afzelii
LITEKLSKLKNSG

SEQ ID NO: 50444 - protein, 13 aa, Borrelia afzelii
ITEKLSKLKNSGE

SEQ ID NO: 50445 - protein, 13 aa, Borrelia afzelii
TEKLSKLKNSGEL

SEQ ID NO: 50446 - protein, 13 aa, Borrelia afzelii
EKLSKLKNSGELK

SEQ ID NO: 50447 - protein, 13 aa, Borrelia afzelii
KLSKLKNSGELKA

SEQ ID NO: 50448 - protein, 13 aa, Borrelia afzelii
LSKLKNSGELKAK

SEQ ID NO: 50449 - protein, 13 aa, Borrelia afzelii
SKLKNSGELKAKI

SEQ ID NO: 50450 - protein, 13 aa, Borrelia afzelii
KLKNSGELKAKIE

SEQ ID NO: 50451 - protein, 13 aa, Borrelia afzelii
LKNSGELKAKIED

SEQ ID NO: 50452 - protein, 13 aa, Borrelia afzelii
KNSGELKAKIEDA

SEQ ID NO: 50453 - protein, 13 aa, Borrelia afzelii
NSGELKAKIEDAK

SEQ ID NO: 50454 - protein, 13 aa, Borrelia afzelii
SGELKAKIEDAKK

SEQ ID NO: 50455 - protein, 13 aa, Borrelia afzelii
GELKAKIEDAKKC

SEQ ID NO: 50456 - protein, 13 aa, Borrelia afzelii
ELKAKIEDAKKCS

SEQ ID NO: 50457 - protein, 13 aa, Borrelia afzelii
LKAKIEDAKKCSE

SEQ ID NO: 50458 - protein, 13 aa, Borrelia afzelii
KAKIEDAKKCSEE

SEQ ID NO: 50459 - protein, 13 aa, Borrelia afzelii
AKIEDAKKCSEEF

SEQ ID NO: 50460 - protein, 13 aa, Borrelia afzelii
KIEDAKKCSEEFT

SEQ ID NO: 50461 - protein, 13 aa, Borrelia afzelii
IEDAKKCSEEFTN

SEQ ID NO: 50462 - protein, 13 aa, Borrelia afzelii
EDAKKCSEEFTNK

SEQ ID NO: 50463 - protein, 13 aa, Borrelia afzelii
DAKKCSEEFTNKL

SEQ ID NO: 50464 - protein, 13 aa, Borrelia afzelii
AKKCSEEFTNKLR

SEQ ID NO: 50465 - protein, 13 aa, Borrelia afzelii
KKCSEEFTNKLRV

SEQ ID NO: 50466 - protein, 13 aa, Borrelia afzelii
KCSEEFTNKLRVS

SEQ ID NO: 50467 - protein, 13 aa, Borrelia afzelii
CSEEFTNKLRVSH

SEQ ID NO: 50468 - protein, 13 aa, Borrelia afzelii
SEEFTNKLRVSHA

SEQ ID NO: 50469 - protein, 13 aa, Borrelia afzelii
EEFTNKLRVSHAD

SEQ ID NO: 50470 - protein, 13 aa, Borrelia afzelii
EFTNKLRVSHADL

SEQ ID NO: 50471 - protein, 13 aa, Borrelia afzelii
FTNKLRVSHADLG

SEQ ID NO: 50472 - protein, 13 aa, Borrelia afzelii
TNKLRVSHADLGK

SEQ ID NO: 50473 - protein, 13 aa, Borrelia afzelii
NKLRVSHADLGKQ

SEQ ID NO: 50474 - protein, 13 aa, Borrelia afzelii
KLRVSHADLGKQG

SEQ ID NO: 50475 - protein, 13 aa, Borrelia afzelii
LRVSHADLGKQGV

SEQ ID NO: 50476 - protein, 13 aa, Borrelia afzelii
RVSHADLGKQGVN

SEQ ID NO: 50477 - protein, 13 aa, Borrelia afzelii
VSHADLGKQGVND

SEQ ID NO: 50478 - protein, 13 aa, Borrelia afzelii
SHADLGKQGVNDD

SEQ ID NO: 50479 - protein, 13 aa, Borrelia afzelii
HADLGKQGVNDDD

SEQ ID NO: 50480 - protein, 13 aa, Borrelia afzelii
ADLGKQGVNDDDA

SEQ ID NO: 50481 - protein, 13 aa, Borrelia afzelii
DLGKQGVNDDDAK

SEQ ID NO: 50482 - protein, 13 aa, Borrelia afzelii
LGKQGVNDDDAKK

SEQ ID NO: 50483 - protein, 13 aa, Borrelia afzelii
GKQGVNDDDAKKA

SEQ ID NO: 50484 - protein, 13 aa, Borrelia afzelii
KQGVNDDDAKKAI

SEQ ID NO: 50485 - protein, 13 aa, Borrelia afzelii
QGVNDDDAKKAIL

SEQ ID NO: 50486 - protein, 13 aa, Borrelia afzelii
GVNDDDAKKAILK

SEQ ID NO: 50487 - protein, 13 aa, Borrelia afzelii
VNDDDAKKAILKT

SEQ ID NO: 50488 - protein, 13 aa, Borrelia afzelii
NDDDAKKAILKTN

SEQ ID NO: 50489 - protein, 13 aa, Borrelia afzelii
DDDAKKAILKTNA

SEQ ID NO: 50490 - protein, 13 aa, Borrelia afzelii
DDAKKAILKTNAD

SEQ ID NO: 50491 - protein, 13 aa, Borrelia afzelii
DAKKAILKTNADK

SEQ ID NO: 50492 - protein, 13 aa, Borrelia afzelii
AKKAILKTNADKT

SEQ ID NO: 50493 - protein, 13 aa, Borrelia afzelii
KKAILKTNADKTK

SEQ ID NO: 50494 - protein, 13 aa, Borrelia afzelii
KAILKTNADKTKG

SEQ ID NO: 50495 - protein, 13 aa, Borrelia afzelii
AILKTNADKTKGA

SEQ ID NO: 50496 - protein, 13 aa, Borrelia afzelii
ILKTNADKTKGAE

SEQ ID NO: 50497 - protein, 13 aa, Borrelia afzelii
LKTNADKTKGAEE

SEQ ID NO: 50498 - protein, 13 aa, Borrelia afzelii
KTNADKTKGAEEL

SEQ ID NO: 50499 - protein, 13 aa, Borrelia afzelii
TNADKTKGAEELG

SEQ ID NO: 50500 - protein, 13 aa, Borrelia afzelii
NADKTKGAEELGK

SEQ ID NO: 50501 - protein, 13 aa, Borrelia afzelii
ADKTKGAEELGKL

SEQ ID NO: 50502 - protein, 13 aa, Borrelia afzelii
DKTKGAEELGKLF

SEQ ID NO: 50503 - protein, 13 aa, Borrelia afzelii
KTKGAEELGKLFK

SEQ ID NO: 50504 - protein, 13 aa, Borrelia afzelii
TKGAEELGKLFKS

SEQ ID NO: 50505 - protein, 13 aa, Borrelia afzelii
KGAEELGKLFKSV

SEQ ID NO: 50506 - protein, 13 aa, Borrelia afzelii
GAEELGKLFKSVE

SEQ ID NO: 50507 - protein, 13 aa, Borrelia afzelii
AEELGKLFKSVEG

SEQ ID NO: 50508 - protein, 13 aa, Borrelia afzelii
EELGKLFKSVEGL

SEQ ID NO: 50509 - protein, 13 aa, Borrelia afzelii
ELGKLFKSVEGLV

SEQ ID NO: 50510 - protein, 13 aa, Borrelia afzelii
LGKLFKSVEGLVK

SEQ ID NO: 50511 - protein, 13 aa, Borrelia afzelii
GKLFKSVEGLVKA

SEQ ID NO: 50512 - protein, 13 aa, Borrelia afzelii
KLFKSVEGLVKAA

SEQ ID NO: 50513 - protein, 13 aa, Borrelia afzelii
LFKSVEGLVKAAQ

SEQ ID NO: 50514 - protein, 13 aa, Borrelia afzelii
FKSVEGLVKAAQE

SEQ ID NO: 50515 - protein, 13 aa, Borrelia afzelii
KSVEGLVKAAQEA

SEQ ID NO: 50516 - protein, 13 aa, Borrelia afzelii
SVEGLVKAAQEAL

SEQ ID NO: 50517 - protein, 13 aa, Borrelia afzelii
VEGLVKAAQEALT

SEQ ID NO: 50518 - protein, 13 aa, Borrelia afzelii
EGLVKAAQEALTN

SEQ ID NO: 50519 - protein, 13 aa, Borrelia afzelii
GLVKAAQEALTNS

SEQ ID NO: 50520 - protein, 13 aa, Borrelia afzelii
LVKAAQEALTNSV

SEQ ID NO: 50521 - protein, 13 aa, Borrelia afzelii
VKAAQEALTNSVK

SEQ ID NO: 50522 - protein, 13 aa, Borrelia afzelii
KAAQEALTNSVKE

SEQ ID NO: 50523 - protein, 13 aa, Borrelia afzelii
AAQEALTNSVKEL

SEQ ID NO: 50524 - protein, 13 aa, Borrelia afzelii
AQEALTNSVKELT

SEQ ID NO: 50525 - protein, 13 aa, Borrelia afzelii
QEALTNSVKELTS

SEQ ID NO: 50526 - protein, 13 aa, Borrelia afzelii
EALTNSVKELTSP

SEQ ID NO: 50527 - protein, 13 aa, Borrelia afzelii
ALTNSVKELTSPV

SEQ ID NO: 50528 - protein, 13 aa, Borrelia afzelii
LTNSVKELTSPVV

SEQ ID NO: 50529 - protein, 13 aa, Borrelia afzelii
TNSVKELTSPVVA

SEQ ID NO: 50530 - protein, 13 aa, Borrelia afzelii
NSVKELTSPVVAE

SEQ ID NO: 50531 - protein, 13 aa, Borrelia afzelii
SVKELTSPVVAES

SEQ ID NO: 50532 - protein, 13 aa, Borrelia afzelii
VKELTSPVVAESP

SEQ ID NO: 50533 - protein, 13 aa, Borrelia afzelii
KELTSPVVAESPK

SEQ ID NO: 50534 - protein, 13 aa, Borrelia afzelii
ELTSPVVAESPKK

SEQ ID NO: 50535 - protein, 13 aa, Borrelia afzelii
LTSPVVAESPKKP

SEQ ID NO: 50536 - protein, 14 aa, Borrelia afzelii
MKKNTLSAILMTLF

SEQ ID NO: 50537 - protein, 14 aa, Borrelia afzelii
KKNTLSAILMTLFL

SEQ ID NO: 50538 - protein, 14 aa, Borrelia afzelii
KNTLSAILMTLFLF

SEQ ID NO: 50539 - protein, 14 aa, Borrelia afzelii
NTLSAILMTLFLFI

SEQ ID NO: 50540 - protein, 14 aa, Borrelia afzelii
TLSAILMTLFLFIS

SEQ ID NO: 50541 - protein, 14 aa, Borrelia afzelii
LSAILMTLFLFISC

SEQ ID NO: 50542 - protein, 14 aa, Borrelia afzelii
SAILMTLFLFISCN

SEQ ID NO: 50543 - protein, 14 aa, Borrelia afzelii
AILMTLFLFISCNN

SEQ ID NO: 50544 - protein, 14 aa, Borrelia afzelii
ILMTLFLFISCNNS

SEQ ID NO: 50545 - protein, 14 aa, Borrelia afzelii
LMTLFLFISCNNSG

SEQ ID NO: 50546 - protein, 14 aa, Borrelia afzelii
MTLFLFISCNNSGK

SEQ ID NO: 50547 - protein, 14 aa, Borrelia afzelii
TLFLFISCNNSGKG

SEQ ID NO: 50548 - protein, 14 aa, Borrelia afzelii
LFLFISCNNSGKGG

SEQ ID NO: 50549 - protein, 14 aa, Borrelia afzelii
FLFISCNNSGKGGD

SEQ ID NO: 50550 - protein, 14 aa, Borrelia afzelii
LFISCNNSGKGGDS

SEQ ID NO: 50551 - protein, 14 aa, Borrelia afzelii
FISCNNSGKGGDSA

SEQ ID NO: 50552 - protein, 14 aa, Borrelia afzelii
ISCNNSGKGGDSAS

SEQ ID NO: 50553 - protein, 14 aa, Borrelia afzelii
SCNNSGKGGDSAST

SEQ ID NO: 50554 - protein, 14 aa, Borrelia afzelii
CNNSGKGGDSASTN

SEQ ID NO: 50555 - protein, 14 aa, Borrelia afzelii
NNSGKGGDSASTNP

SEQ ID NO: 50556 - protein, 14 aa, Borrelia afzelii
NSGKGGDSASTNPA

SEQ ID NO: 50557 - protein, 14 aa, Borrelia afzelii
SGKGGDSASTNPAD

SEQ ID NO: 50558 - protein, 14 aa, Borrelia afzelii
GKGGDSASTNPADE

SEQ ID NO: 50559 - protein, 14 aa, Borrelia afzelii
KGGDSASTNPADES

SEQ ID NO: 50560 - protein, 14 aa, Borrelia afzelii
GGDSASTNPADESA

SEQ ID NO: 50561 - protein, 14 aa, Borrelia afzelii
GDSASTNPADESAK

SEQ ID NO: 50562 - protein, 14 aa, Borrelia afzelii
DSASTNPADESAKG

SEQ ID NO: 50563 - protein, 14 aa, Borrelia afzelii
SASTNPADESAKGP

SEQ ID NO: 50564 - protein, 14 aa, Borrelia afzelii
ASTNPADESAKGPN

SEQ ID NO: 50565 - protein, 14 aa, Borrelia afzelii
STNPADESAKGPNL

SEQ ID NO: 50566 - protein, 14 aa, Borrelia afzelii
TNPADESAKGPNLT

SEQ ID NO: 50567 - protein, 14 aa, Borrelia afzelii
NPADESAKGPNLTE

SEQ ID NO: 50568 - protein, 14 aa, Borrelia afzelii
PADESAKGPNLTEI

SEQ ID NO: 50569 - protein, 14 aa, Borrelia afzelii
ADESAKGPNLTEIS

SEQ ID NO: 50570 - protein, 14 aa, Borrelia afzelii
DESAKGPNLTEISK

SEQ ID NO: 50571 - protein, 14 aa, Borrelia afzelii
ESAKGPNLTEISKK

SEQ ID NO: 50572 - protein, 14 aa, Borrelia afzelii
SAKGPNLTEISKKI

SEQ ID NO: 50573 - protein, 14 aa, Borrelia afzelii
AKGPNLTEISKKIT

SEQ ID NO: 50574 - protein, 14 aa, Borrelia afzelii
KGPNLTEISKKITD

SEQ ID NO: 50575 - protein, 14 aa, Borrelia afzelii
GPNLTEISKKITDS

SEQ ID NO: 50576 - protein, 14 aa, Borrelia afzelii
PNLTEISKKITDSN

SEQ ID NO: 50577 - protein, 14 aa, Borrelia afzelii
NLTEISKKITDSNA

SEQ ID NO: 50578 - protein, 14 aa, Borrelia afzelii
LTEISKKITDSNAF

SEQ ID NO: 50579 - protein, 14 aa, Borrelia afzelii
TEISKKITDSNAFV

SEQ ID NO: 50580 - protein, 14 aa, Borrelia afzelii
EISKKITDSNAFVL

SEQ ID NO: 50581 - protein, 14 aa, Borrelia afzelii
ISKKITDSNAFVLA

SEQ ID NO: 50582 - protein, 14 aa, Borrelia afzelii
SKKITDSNAFVLAV

SEQ ID NO: 50583 - protein, 14 aa, Borrelia afzelii
KKITDSNAFVLAVK

SEQ ID NO: 50584 - protein, 14 aa, Borrelia afzelii
KITDSNAFVLAVKE

SEQ ID NO: 50585 - protein, 14 aa, Borrelia afzelii
ITDSNAFVLAVKEV

SEQ ID NO: 50586 - protein, 14 aa, Borrelia afzelii
TDSNAFVLAVKEVE

SEQ ID NO: 50587 - protein, 14 aa, Borrelia afzelii
DSNAFVLAVKEVET

SEQ ID NO: 50588 - protein, 14 aa, Borrelia afzelii
SNAFVLAVKEVETL

SEQ ID NO: 50589 - protein, 14 aa, Borrelia afzelii
NAFVLAVKEVETLV

SEQ ID NO: 50590 - protein, 14 aa, Borrelia afzelii
AFVLAVKEVETLVS

SEQ ID NO: 50591 - protein, 14 aa, Borrelia afzelii
FVLAVKEVETLVSS

SEQ ID NO: 50592 - protein, 14 aa, Borrelia afzelii
VLAVKEVETLVSSI

SEQ ID NO: 50593 - protein, 14 aa, Borrelia afzelii
LAVKEVETLVSSID

SEQ ID NO: 50594 - protein, 14 aa, Borrelia afzelii
AVKEVETLVSSIDE

SEQ ID NO: 50595 - protein, 14 aa, Borrelia afzelii
VKEVETLVSSIDEL

SEQ ID NO: 50596 - protein, 14 aa, Borrelia afzelii
KEVETLVSSIDELA

SEQ ID NO: 50597 - protein, 14 aa, Borrelia afzelii
EVETLVSSIDELAN

SEQ ID NO: 50598 - protein, 14 aa, Borrelia afzelii
VETLVSSIDELANK

SEQ ID NO: 50599 - protein, 14 aa, Borrelia afzelii
ETLVSSIDELANKA

SEQ ID NO: 50600 - protein, 14 aa, Borrelia afzelii
TLVSSIDELANKAI

SEQ ID NO: 50601 - protein, 14 aa, Borrelia afzelii
LVSSIDELANKAIG

SEQ ID NO: 50602 - protein, 14 aa, Borrelia afzelii
VSSIDELANKAIGK

SEQ ID NO: 50603 - protein, 14 aa, Borrelia afzelii
SSIDELANKAIGKK

SEQ ID NO: 50604 - protein, 14 aa, Borrelia afzelii
SIDELANKAIGKKI

SEQ ID NO: 50605 - protein, 14 aa, Borrelia afzelii
IDELANKAIGKKIQ

SEQ ID NO: 50606 - protein, 14 aa, Borrelia afzelii
DELANKAIGKKIQQ

SEQ ID NO: 50607 - protein, 14 aa, Borrelia afzelii
ELANKAIGKKIQQN

SEQ ID NO: 50608 - protein, 14 aa, Borrelia afzelii
LANKAIGKKIQQNG

SEQ ID NO: 50609 - protein, 14 aa, Borrelia afzelii
ANKAIGKKIQQNGL

SEQ ID NO: 50610 - protein, 14 aa, Borrelia afzelii
NKAIGKKIQQNGLG

SEQ ID NO: 50611 - protein, 14 aa, Borrelia afzelii
KAIGKKIQQNGLGA

SEQ ID NO: 50612 - protein, 14 aa, Borrelia afzelii
AIGKKIQQNGLGAE

SEQ ID NO: 50613 - protein, 14 aa, Borrelia afzelii
IGKKIQQNGLGAEA

SEQ ID NO: 50614 - protein, 14 aa, Borrelia afzelii
GKKIQQNGLGAEAN

SEQ ID NO: 50615 - protein, 14 aa, Borrelia afzelii
KKIQQNGLGAEANR

SEQ ID NO: 50616 - protein, 14 aa, Borrelia afzelii
KIQQNGLGAEANRN

SEQ ID NO: 50617 - protein, 14 aa, Borrelia afzelii
IQQNGLGAEANRNE

SEQ ID NO: 50618 - protein, 14 aa, Borrelia afzelii
QQNGLGAEANRNES

SEQ ID NO: 50619 - protein, 14 aa, Borrelia afzelii
QNGLGAEANRNESL

SEQ ID NO: 50620 - protein, 14 aa, Borrelia afzelii
NGLGAEANRNESLL

SEQ ID NO: 50621 - protein, 14 aa, Borrelia afzelii
GLGAEANRNESLLA

SEQ ID NO: 50622 - protein, 14 aa, Borrelia afzelii
LGAEANRNESLLAG

SEQ ID NO: 50623 - protein, 14 aa, Borrelia afzelii
GAEANRNESLLAGV

SEQ ID NO: 50624 - protein, 14 aa, Borrelia afzelii
AEANRNESLLAGVH

SEQ ID NO: 50625 - protein, 14 aa, Borrelia afzelii
EANRNESLLAGVHE

SEQ ID NO: 50626 - protein, 14 aa, Borrelia afzelii
ANRNESLLAGVHEI

SEQ ID NO: 50627 - protein, 14 aa, Borrelia afzelii
NRNESLLAGVHEIS

SEQ ID NO: 50628 - protein, 14 aa, Borrelia afzelii
RNESLLAGVHEIST

SEQ ID NO: 50629 - protein, 14 aa, Borrelia afzelii
NESLLAGVHEISTL

SEQ ID NO: 50630 - protein, 14 aa, Borrelia afzelii
ESLLAGVHEISTLI

SEQ ID NO: 50631 - protein, 14 aa, Borrelia afzelii
SLLAGVHEISTLIT

SEQ ID NO: 50632 - protein, 14 aa, Borrelia afzelii
LLAGVHEISTLITE

SEQ ID NO: 50633 - protein, 14 aa, Borrelia afzelii
LAGVHEISTLITEK

SEQ ID NO: 50634 - protein, 14 aa, Borrelia afzelii
AGVHEISTLITEKL

SEQ ID NO: 50635 - protein, 14 aa, Borrelia afzelii
GVHEISTLITEKLS

SEQ ID NO: 50636 - protein, 14 aa, Borrelia afzelii
VHEISTLITEKLSK

SEQ ID NO: 50637 - protein, 14 aa, Borrelia afzelii
HEISTLITEKLSKL

SEQ ID NO: 50638 - protein, 14 aa, Borrelia afzelii
EISTLITEKLSKLK

SEQ ID NO: 50639 - protein, 14 aa, Borrelia afzelii
ISTLITEKLSKLKN

SEQ ID NO: 50640 - protein, 14 aa, Borrelia afzelii
STLITEKLSKLKNS

SEQ ID NO: 50641 - protein, 14 aa, Borrelia afzelii
TLITEKLSKLKNSG

SEQ ID NO: 50642 - protein, 14 aa, Borrelia afzelii
LITEKLSKLKNSGE

SEQ ID NO: 50643 - protein, 14 aa, Borrelia afzelii
ITEKLSKLKNSGEL

SEQ ID NO: 50644 - protein, 14 aa, Borrelia afzelii
TEKLSKLKNSGELK

SEQ ID NO: 50645 - protein, 14 aa, Borrelia afzelii
EKLSKLKNSGELKA

SEQ ID NO: 50646 - protein, 14 aa, Borrelia afzelii
KLSKLKNSGELKAK

SEQ ID NO: 50647 - protein, 14 aa, Borrelia afzelii
LSKLKNSGELKAKI

SEQ ID NO: 50648 - protein, 14 aa, Borrelia afzelii
SKLKNSGELKAKIE

SEQ ID NO: 50649 - protein, 14 aa, Borrelia afzelii
KLKNSGELKAKIED

SEQ ID NO: 50650 - protein, 14 aa, Borrelia afzelii
LKNSGELKAKIEDA

SEQ ID NO: 50651 - protein, 14 aa, Borrelia afzelii
KNSGELKAKIEDAK

SEQ ID NO: 50652 - protein, 14 aa, Borrelia afzelii
NSGELKAKIEDAKK

SEQ ID NO: 50653 - protein, 14 aa, Borrelia afzelii
SGELKAKIEDAKKC

SEQ ID NO: 50654 - protein, 14 aa, Borrelia afzelii
GELKAKIEDAKKCS

SEQ ID NO: 50655 - protein, 14 aa, Borrelia afzelii
ELKAKIEDAKKCSE

SEQ ID NO: 50656 - protein, 14 aa, Borrelia afzelii
LKAKIEDAKKCSEE

SEQ ID NO: 50657 - protein, 14 aa, Borrelia afzelii
KAKIEDAKKCSEEF

SEQ ID NO: 50658 - protein, 14 aa, Borrelia afzelii
AKIEDAKKCSEEFT

SEQ ID NO: 50659 - protein, 14 aa, Borrelia afzelii
KIEDAKKCSEEFTN

SEQ ID NO: 50660 - protein, 14 aa, Borrelia afzelii
IEDAKKCSEEFTNK

SEQ ID NO: 50661 - protein, 14 aa, Borrelia afzelii
EDAKKCSEEFTNKL

SEQ ID NO: 50662 - protein, 14 aa, Borrelia afzelii
DAKKCSEEFTNKLR

SEQ ID NO: 50663 - protein, 14 aa, Borrelia afzelii
AKKCSEEFTNKLRV

SEQ ID NO: 50664 - protein, 14 aa, Borrelia afzelii
KKCSEEFTNKLRVS

SEQ ID NO: 50665 - protein, 14 aa, Borrelia afzelii
KCSEEFTNKLRVSH

SEQ ID NO: 50666 - protein, 14 aa, Borrelia afzelii
CSEEFTNKLRVSHA

SEQ ID NO: 50667 - protein, 14 aa, Borrelia afzelii
SEEFTNKLRVSHAD

SEQ ID NO: 50668 - protein, 14 aa, Borrelia afzelii
EEFTNKLRVSHADL

SEQ ID NO: 50669 - protein, 14 aa, Borrelia afzelii
EFTNKLRVSHADLG

SEQ ID NO: 50670 - protein, 14 aa, Borrelia afzelii
FTNKLRVSHADLGK

SEQ ID NO: 50671 - protein, 14 aa, Borrelia afzelii
TNKLRVSHADLGKQ

SEQ ID NO: 50672 - protein, 14 aa, Borrelia afzelii
NKLRVSHADLGKQG

SEQ ID NO: 50673 - protein, 14 aa, Borrelia afzelii
KLRVSHADLGKQGV

SEQ ID NO: 50674 - protein, 14 aa, Borrelia afzelii
LRVSHADLGKQGVN

SEQ ID NO: 50675 - protein, 14 aa, Borrelia afzelii
RVSHADLGKQGVND

SEQ ID NO: 50676 - protein, 14 aa, Borrelia afzelii
VSHADLGKQGVNDD

SEQ ID NO: 50677 - protein, 14 aa, Borrelia afzelii
SHADLGKQGVNDDD

SEQ ID NO: 50678 - protein, 14 aa, Borrelia afzelii
HADLGKQGVNDDDA

SEQ ID NO: 50679 - protein, 14 aa, Borrelia afzelii
ADLGKQGVNDDDAK

SEQ ID NO: 50680 - protein, 14 aa, Borrelia afzelii
DLGKQGVNDDDAKK

SEQ ID NO: 50681 - protein, 14 aa, Borrelia afzelii
LGKQGVNDDDAKKA

SEQ ID NO: 50682 - protein, 14 aa, Borrelia afzelii
GKQGVNDDDAKKAI

SEQ ID NO: 50683 - protein, 14 aa, Borrelia afzelii
KQGVNDDDAKKAIL

SEQ ID NO: 50684 - protein, 14 aa, Borrelia afzelii
QGVNDDDAKKAILK

SEQ ID NO: 50685 - protein, 14 aa, Borrelia afzelii
GVNDDDAKKAILKT

SEQ ID NO: 50686 - protein, 14 aa, Borrelia afzelii
VNDDDAKKAILKTN

SEQ ID NO: 50687 - protein, 14 aa, Borrelia afzelii
NDDDAKKAILKTNA

SEQ ID NO: 50688 - protein, 14 aa, Borrelia afzelii
DDDAKKAILKTNAD

SEQ ID NO: 50689 - protein, 14 aa, Borrelia afzelii
DDAKKAILKTNADK

SEQ ID NO: 50690 - protein, 14 aa, Borrelia afzelii
DAKKAILKTNADKT

SEQ ID NO: 50691 - protein, 14 aa, Borrelia afzelii
AKKAILKTNADKTK

SEQ ID NO: 50692 - protein, 14 aa, Borrelia afzelii
KKAILKTNADKTKG

SEQ ID NO: 50693 - protein, 14 aa, Borrelia afzelii
KAILKTNADKTKGA

SEQ ID NO: 50694 - protein, 14 aa, Borrelia afzelii
AILKTNADKTKGAE

SEQ ID NO: 50695 - protein, 14 aa, Borrelia afzelii
ILKTNADKTKGAEE

SEQ ID NO: 50696 - protein, 14 aa, Borrelia afzelii
LKTNADKTKGAEEL

SEQ ID NO: 50697 - protein, 14 aa, Borrelia afzelii
KTNADKTKGAEELG

SEQ ID NO: 50698 - protein, 14 aa, Borrelia afzelii
TNADKTKGAEELGK

SEQ ID NO: 50699 - protein, 14 aa, Borrelia afzelii
NADKTKGAEELGKL

SEQ ID NO: 50700 - protein, 14 aa, Borrelia afzelii
ADKTKGAEELGKLF

SEQ ID NO: 50701 - protein, 14 aa, Borrelia afzelii
DKTKGAEELGKLFK

SEQ ID NO: 50702 - protein, 14 aa, Borrelia afzelii
KTKGAEELGKLFKS

SEQ ID NO: 50703 - protein, 14 aa, Borrelia afzelii
TKGAEELGKLFKSV

SEQ ID NO: 50704 - protein, 14 aa, Borrelia afzelii
KGAEELGKLFKSVE

SEQ ID NO: 50705 - protein, 14 aa, Borrelia afzelii
GAEELGKLFKSVEG

SEQ ID NO: 50706 - protein, 14 aa, Borrelia afzelii
AEELGKLFKSVEGL

SEQ ID NO: 50707 - protein, 14 aa, Borrelia afzelii
EELGKLFKSVEGLV

SEQ ID NO: 50708 - protein, 14 aa, Borrelia afzelii
ELGKLFKSVEGLVK

SEQ ID NO: 50709 - protein, 14 aa, Borrelia afzelii
LGKLFKSVEGLVKA

SEQ ID NO: 50710 - protein, 14 aa, Borrelia afzelii
GKLFKSVEGLVKAA

SEQ ID NO: 50711 - protein, 14 aa, Borrelia afzelii
KLFKSVEGLVKAAQ

SEQ ID NO: 50712 - protein, 14 aa, Borrelia afzelii
LFKSVEGLVKAAQE

SEQ ID NO: 50713 - protein, 14 aa, Borrelia afzelii
FKSVEGLVKAAQEA

SEQ ID NO: 50714 - protein, 14 aa, Borrelia afzelii
KSVEGLVKAAQEAL

SEQ ID NO: 50715 - protein, 14 aa, Borrelia afzelii
SVEGLVKAAQEALT

SEQ ID NO: 50716 - protein, 14 aa, Borrelia afzelii
VEGLVKAAQEALTN

SEQ ID NO: 50717 - protein, 14 aa, Borrelia afzelii
EGLVKAAQEALTNS

SEQ ID NO: 50718 - protein, 14 aa, Borrelia afzelii
GLVKAAQEALTNSV

SEQ ID NO: 50719 - protein, 14 aa, Borrelia afzelii
LVKAAQEALTNSVK

SEQ ID NO: 50720 - protein, 14 aa, Borrelia afzelii
VKAAQEALTNSVKE

SEQ ID NO: 50721 - protein, 14 aa, Borrelia afzelii
KAAQEALTNSVKEL

SEQ ID NO: 50722 - protein, 14 aa, Borrelia afzelii
AAQEALTNSVKELT

SEQ ID NO: 50723 - protein, 14 aa, Borrelia afzelii
AQEALTNSVKELTS

SEQ ID NO: 50724 - protein, 14 aa, Borrelia afzelii
QEALTNSVKELTSP

SEQ ID NO: 50725 - protein, 14 aa, Borrelia afzelii
EALTNSVKELTSPV

SEQ ID NO: 50726 - protein, 14 aa, Borrelia afzelii
ALTNSVKELTSPVV

SEQ ID NO: 50727 - protein, 14 aa, Borrelia afzelii
LTNSVKELTSPVVA

SEQ ID NO: 50728 - protein, 14 aa, Borrelia afzelii
TNSVKELTSPVVAE

SEQ ID NO: 50729 - protein, 14 aa, Borrelia afzelii
NSVKELTSPVVAES

SEQ ID NO: 50730 - protein, 14 aa, Borrelia afzelii
SVKELTSPVVAESP

SEQ ID NO: 50731 - protein, 14 aa, Borrelia afzelii
VKELTSPVVAESPK

SEQ ID NO: 50732 - protein, 14 aa, Borrelia afzelii
KELTSPVVAESPKK

SEQ ID NO: 50733 - protein, 14 aa, Borrelia afzelii
ELTSPVVAESPKKP

SEQ ID NO: 50734 - protein, 15 aa, Borrelia afzelii
MKKNTLSAILMTLFL

SEQ ID NO: 50735 - protein, 15 aa, Borrelia afzelii
KKNTLSAILMTLFLF

SEQ ID NO: 50736 - protein, 15 aa, Borrelia afzelii
KNTLSAILMTLFLFI

SEQ ID NO: 50737 - protein, 15 aa, Borrelia afzelii
NTLSAILMTLFLFIS

SEQ ID NO: 50738 - protein, 15 aa, Borrelia afzelii
TLSAILMTLFLFISC

SEQ ID NO: 50739 - protein, 15 aa, Borrelia afzelii
LSAILMTLFLFISCN

SEQ ID NO: 50740 - protein, 15 aa, Borrelia afzelii
SAILMTLFLFISCNN

SEQ ID NO: 50741 - protein, 15 aa, Borrelia afzelii
AILMTLFLFISCNNS

SEQ ID NO: 50742 - protein, 15 aa, Borrelia afzelii
ILMTLFLFISCNNSG

SEQ ID NO: 50743 - protein, 15 aa, Borrelia afzelii
LMTLFLFISCNNSGK

SEQ ID NO: 50744 - protein, 15 aa, Borrelia afzelii
MTLFLFISCNNSGKG

SEQ ID NO: 50745 - protein, 15 aa, Borrelia afzelii
TLFLFISCNNSGKGG

SEQ ID NO: 50746 - protein, 15 aa, Borrelia afzelii
LFLFISCNNSGKGGD

SEQ ID NO: 50747 - protein, 15 aa, Borrelia afzelii
FLFISCNNSGKGGDS

SEQ ID NO: 50748 - protein, 15 aa, Borrelia afzelii
LFISCNNSGKGGDSA

SEQ ID NO: 50749 - protein, 15 aa, Borrelia afzelii
FISCNNSGKGGDSAS

SEQ ID NO: 50750 - protein, 15 aa, Borrelia afzelii
ISCNNSGKGGDSAST

SEQ ID NO: 50751 - protein, 15 aa, Borrelia afzelii
SCNNSGKGGDSASTN

SEQ ID NO: 50752 - protein, 15 aa, Borrelia afzelii
CNNSGKGGDSASTNP

SEQ ID NO: 50753 - protein, 15 aa, Borrelia afzelii
NNSGKGGDSASTNPA

SEQ ID NO: 50754 - protein, 15 aa, Borrelia afzelii
NSGKGGDSASTNPAD

SEQ ID NO: 50755 - protein, 15 aa, Borrelia afzelii
SGKGGDSASTNPADE

SEQ ID NO: 50756 - protein, 15 aa, Borrelia afzelii
GKGGDSASTNPADES

SEQ ID NO: 50757 - protein, 15 aa, Borrelia afzelii
KGGDSASTNPADESA

SEQ ID NO: 50758 - protein, 15 aa, Borrelia afzelii
GGDSASTNPADESAK

SEQ ID NO: 50759 - protein, 15 aa, Borrelia afzelii
GDSASTNPADESAKG

SEQ ID NO: 50760 - protein, 15 aa, Borrelia afzelii
DSASTNPADESAKGP

SEQ ID NO: 50761 - protein, 15 aa, Borrelia afzelii
SASTNPADESAKGPN

SEQ ID NO: 50762 - protein, 15 aa, Borrelia afzelii
ASTNPADESAKGPNL

SEQ ID NO: 50763 - protein, 15 aa, Borrelia afzelii
STNPADESAKGPNLT

SEQ ID NO: 50764 - protein, 15 aa, Borrelia afzelii
TNPADESAKGPNLTE

SEQ ID NO: 50765 - protein, 15 aa, Borrelia afzelii
NPADESAKGPNLTEI

SEQ ID NO: 50766 - protein, 15 aa, Borrelia afzelii
PADESAKGPNLTEIS

SEQ ID NO: 50767 - protein, 15 aa, Borrelia afzelii
ADESAKGPNLTEISK

SEQ ID NO: 50768 - protein, 15 aa, Borrelia afzelii
DESAKGPNLTEISKK

SEQ ID NO: 50769 - protein, 15 aa, Borrelia afzelii
ESAKGPNLTEISKKI

SEQ ID NO: 50770 - protein, 15 aa, Borrelia afzelii
SAKGPNLTEISKKIT

SEQ ID NO: 50771 - protein, 15 aa, Borrelia afzelii
AKGPNLTEISKKITD

SEQ ID NO: 50772 - protein, 15 aa, Borrelia afzelii
KGPNLTEISKKITDS

SEQ ID NO: 50773 - protein, 15 aa, Borrelia afzelii
GPNLTEISKKITDSN

SEQ ID NO: 50774 - protein, 15 aa, Borrelia afzelii
PNLTEISKKITDSNA

SEQ ID NO: 50775 - protein, 15 aa, Borrelia afzelii
NLTEISKKITDSNAF

SEQ ID NO: 50776 - protein, 15 aa, Borrelia afzelii
LTEISKKITDSNAFV

SEQ ID NO: 50777 - protein, 15 aa, Borrelia afzelii
TEISKKITDSNAFVL

SEQ ID NO: 50778 - protein, 15 aa, Borrelia afzelii
EISKKITDSNAFVLA

SEQ ID NO: 50779 - protein, 15 aa, Borrelia afzelii
ISKKITDSNAFVLAV

SEQ ID NO: 50780 - protein, 15 aa, Borrelia afzelii
SKKITDSNAFVLAVK

SEQ ID NO: 50781 - protein, 15 aa, Borrelia afzelii
KKITDSNAFVLAVKE

SEQ ID NO: 50782 - protein, 15 aa, Borrelia afzelii
KITDSNAFVLAVKEV

SEQ ID NO: 50783 - protein, 15 aa, Borrelia afzelii
ITDSNAFVLAVKEVE

SEQ ID NO: 50784 - protein, 15 aa, Borrelia afzelii
TDSNAFVLAVKEVET

SEQ ID NO: 50785 - protein, 15 aa, Borrelia afzelii
DSNAFVLAVKEVETL

SEQ ID NO: 50786 - protein, 15 aa, Borrelia afzelii
SNAFVLAVKEVETLV

SEQ ID NO: 50787 - protein, 15 aa, Borrelia afzelii
NAFVLAVKEVETLVS

SEQ ID NO: 50788 - protein, 15 aa, Borrelia afzelii
AFVLAVKEVETLVSS

SEQ ID NO: 50789 - protein, 15 aa, Borrelia afzelii
FVLAVKEVETLVSSI

SEQ ID NO: 50790 - protein, 15 aa, Borrelia afzelii
VLAVKEVETLVSSID

SEQ ID NO: 50791 - protein, 15 aa, Borrelia afzelii
LAVKEVETLVSSIDE

SEQ ID NO: 50792 - protein, 15 aa, Borrelia afzelii
AVKEVETLVSSIDEL

SEQ ID NO: 50793 - protein, 15 aa, Borrelia afzelii
VKEVETLVSSIDELA

SEQ ID NO: 50794 - protein, 15 aa, Borrelia afzelii
KEVETLVSSIDELAN

SEQ ID NO: 50795 - protein, 15 aa, Borrelia afzelii
EVETLVSSIDELANK

SEQ ID NO: 50796 - protein, 15 aa, Borrelia afzelii
VETLVSSIDELANKA

SEQ ID NO: 50797 - protein, 15 aa, Borrelia afzelii
ETLVSSIDELANKAI

SEQ ID NO: 50798 - protein, 15 aa, Borrelia afzelii
TLVSSIDELANKAIG

SEQ ID NO: 50799 - protein, 15 aa, Borrelia afzelii
LVSSIDELANKAIGK

SEQ ID NO: 50800 - protein, 15 aa, Borrelia afzelii
VSSIDELANKAIGKK

SEQ ID NO: 50801 - protein, 15 aa, Borrelia afzelii
SSIDELANKAIGKKI

SEQ ID NO: 50802 - protein, 15 aa, Borrelia afzelii
SIDELANKAIGKKIQ

SEQ ID NO: 50803 - protein, 15 aa, Borrelia afzelii
IDELANKAIGKKIQQ

SEQ ID NO: 50804 - protein, 15 aa, Borrelia afzelii
DELANKAIGKKIQQN

SEQ ID NO: 50805 - protein, 15 aa, Borrelia afzelii
ELANKAIGKKIQQNG

SEQ ID NO: 50806 - protein, 15 aa, Borrelia afzelii
LANKAIGKKIQQNGL

SEQ ID NO: 50807 - protein, 15 aa, Borrelia afzelii
ANKAIGKKIQQNGLG

SEQ ID NO: 50808 - protein, 15 aa, Borrelia afzelii
NKAIGKKIQQNGLGA

SEQ ID NO: 50809 - protein, 15 aa, Borrelia afzelii
KAIGKKIQQNGLGAE

SEQ ID NO: 50810 - protein, 15 aa, Borrelia afzelii
AIGKKIQQNGLGAEA

SEQ ID NO: 50811 - protein, 15 aa, Borrelia afzelii
IGKKIQQNGLGAEAN

SEQ ID NO: 50812 - protein, 15 aa, Borrelia afzelii
GKKIQQNGLGAEANR

SEQ ID NO: 50813 - protein, 15 aa, Borrelia afzelii
KKIQQNGLGAEANRN

SEQ ID NO: 50814 - protein, 15 aa, Borrelia afzelii
KIQQNGLGAEANRNE

SEQ ID NO: 50815 - protein, 15 aa, Borrelia afzelii
IQQNGLGAEANRNES

SEQ ID NO: 50816 - protein, 15 aa, Borrelia afzelii
QQNGLGAEANRNESL

SEQ ID NO: 50817 - protein, 15 aa, Borrelia afzelii
QNGLGAEANRNESLL

SEQ ID NO: 50818 - protein, 15 aa, Borrelia afzelii
NGLGAEANRNESLLA

SEQ ID NO: 50819 - protein, 15 aa, Borrelia afzelii
GLGAEANRNESLLAG

SEQ ID NO: 50820 - protein, 15 aa, Borrelia afzelii
LGAEANRNESLLAGV

SEQ ID NO: 50821 - protein, 15 aa, Borrelia afzelii
GAEANRNESLLAGVH

SEQ ID NO: 50822 - protein, 15 aa, Borrelia afzelii
AEANRNESLLAGVHE

SEQ ID NO: 50823 - protein, 15 aa, Borrelia afzelii
EANRNESLLAGVHEI

SEQ ID NO: 50824 - protein, 15 aa, Borrelia afzelii
ANRNESLLAGVHEIS

SEQ ID NO: 50825 - protein, 15 aa, Borrelia afzelii
NRNESLLAGVHEIST

SEQ ID NO: 50826 - protein, 15 aa, Borrelia afzelii
RNESLLAGVHEISTL

SEQ ID NO: 50827 - protein, 15 aa, Borrelia afzelii
NESLLAGVHEISTLI

SEQ ID NO: 50828 - protein, 15 aa, Borrelia afzelii
ESLLAGVHEISTLIT

SEQ ID NO: 50829 - protein, 15 aa, Borrelia afzelii
SLLAGVHEISTLITE

SEQ ID NO: 50830 - protein, 15 aa, Borrelia afzelii
LLAGVHEISTLITEK

SEQ ID NO: 50831 - protein, 15 aa, Borrelia afzelii
LAGVHEISTLITEKL

SEQ ID NO: 50832 - protein, 15 aa, Borrelia afzelii
AGVHEISTLITEKLS

SEQ ID NO: 50833 - protein, 15 aa, Borrelia afzelii
GVHEISTLITEKLSK

SEQ ID NO: 50834 - protein, 15 aa, Borrelia afzelii
VHEISTLITEKLSKL

SEQ ID NO: 50835 - protein, 15 aa, Borrelia afzelii
HEISTLITEKLSKLK

SEQ ID NO: 50836 - protein, 15 aa, Borrelia afzelii
EISTLITEKLSKLKN

SEQ ID NO: 50837 - protein, 15 aa, Borrelia afzelii
ISTLITEKLSKLKNS

SEQ ID NO: 50838 - protein, 15 aa, Borrelia afzelii
STLITEKLSKLKNSG

SEQ ID NO: 50839 - protein, 15 aa, Borrelia afzelii
TLITEKLSKLKNSGE

SEQ ID NO: 50840 - protein, 15 aa, Borrelia afzelii
LITEKLSKLKNSGEL

SEQ ID NO: 50841 - protein, 15 aa, Borrelia afzelii
ITEKLSKLKNSGELK

SEQ ID NO: 50842 - protein, 15 aa, Borrelia afzelii
TEKLSKLKNSGELKA

SEQ ID NO: 50843 - protein, 15 aa, Borrelia afzelii
EKLSKLKNSGELKAK

SEQ ID NO: 50844 - protein, 15 aa, Borrelia afzelii
KLSKLKNSGELKAKI

SEQ ID NO: 50845 - protein, 15 aa, Borrelia afzelii
LSKLKNSGELKAKIE

SEQ ID NO: 50846 - protein, 15 aa, Borrelia afzelii
SKLKNSGELKAKIED

SEQ ID NO: 50847 - protein, 15 aa, Borrelia afzelii
KLKNSGELKAKIEDA

SEQ ID NO: 50848 - protein, 15 aa, Borrelia afzelii
LKNSGELKAKIEDAK

SEQ ID NO: 50849 - protein, 15 aa, Borrelia afzelii
KNSGELKAKIEDAKK

SEQ ID NO: 50850 - protein, 15 aa, Borrelia afzelii
NSGELKAKIEDAKKC

SEQ ID NO: 50851 - protein, 15 aa, Borrelia afzelii
SGELKAKIEDAKKCS

SEQ ID NO: 50852 - protein, 15 aa, Borrelia afzelii
GELKAKIEDAKKCSE

SEQ ID NO: 50853 - protein, 15 aa, Borrelia afzelii
ELKAKIEDAKKCSEE

SEQ ID NO: 50854 - protein, 15 aa, Borrelia afzelii
LKAKIEDAKKCSEEF

SEQ ID NO: 50855 - protein, 15 aa, Borrelia afzelii
KAKIEDAKKCSEEFT

SEQ ID NO: 50856 - protein, 15 aa, Borrelia afzelii
AKIEDAKKCSEEFTN

SEQ ID NO: 50857 - protein, 15 aa, Borrelia afzelii
KIEDAKKCSEEFTNK

SEQ ID NO: 50858 - protein, 15 aa, Borrelia afzelii
IEDAKKCSEEFTNKL

SEQ ID NO: 50859 - protein, 15 aa, Borrelia afzelii
EDAKKCSEEFTNKLR

SEQ ID NO: 50860 - protein, 15 aa, Borrelia afzelii
DAKKCSEEFTNKLRV

SEQ ID NO: 50861 - protein, 15 aa, Borrelia afzelii
AKKCSEEFTNKLRVS

SEQ ID NO: 50862 - protein, 15 aa, Borrelia afzelii
KKCSEEFTNKLRVSH

SEQ ID NO: 50863 - protein, 15 aa, Borrelia afzelii
KCSEEFTNKLRVSHA

SEQ ID NO: 50864 - protein, 15 aa, Borrelia afzelii
CSEEFTNKLRVSHAD

SEQ ID NO: 50865 - protein, 15 aa, Borrelia afzelii
SEEFTNKLRVSHADL

SEQ ID NO: 50866 - protein, 15 aa, Borrelia afzelii
EEFTNKLRVSHADLG

SEQ ID NO: 50867 - protein, 15 aa, Borrelia afzelii
EFTNKLRVSHADLGK

SEQ ID NO: 50868 - protein, 15 aa, Borrelia afzelii
FTNKLRVSHADLGKQ

SEQ ID NO: 50869 - protein, 15 aa, Borrelia afzelii
TNKLRVSHADLGKQG

SEQ ID NO: 50870 - protein, 15 aa, Borrelia afzelii
NKLRVSHADLGKQGV

SEQ ID NO: 50871 - protein, 15 aa, Borrelia afzelii
KLRVSHADLGKQGVN

SEQ ID NO: 50872 - protein, 15 aa, Borrelia afzelii
LRVSHADLGKQGVND

SEQ ID NO: 50873 - protein, 15 aa, Borrelia afzelii
RVSHADLGKQGVNDD

SEQ ID NO: 50874 - protein, 15 aa, Borrelia afzelii
VSHADLGKQGVNDDD

SEQ ID NO: 50875 - protein, 15 aa, Borrelia afzelii
SHADLGKQGVNDDDA

SEQ ID NO: 50876 - protein, 15 aa, Borrelia afzelii
HADLGKQGVNDDDAK

SEQ ID NO: 50877 - protein, 15 aa, Borrelia afzelii
ADLGKQGVNDDDAKK

SEQ ID NO: 50878 - protein, 15 aa, Borrelia afzelii
DLGKQGVNDDDAKKA

SEQ ID NO: 50879 - protein, 15 aa, Borrelia afzelii
LGKQGVNDDDAKKAI

SEQ ID NO: 50880 - protein, 15 aa, Borrelia afzelii
GKQGVNDDDAKKAIL

SEQ ID NO: 50881 - protein, 15 aa, Borrelia afzelii
KQGVNDDDAKKAILK

SEQ ID NO: 50882 - protein, 15 aa, Borrelia afzelii
QGVNDDDAKKAILKT

SEQ ID NO: 50883 - protein, 15 aa, Borrelia afzelii
GVNDDDAKKAILKTN

SEQ ID NO: 50884 - protein, 15 aa, Borrelia afzelii
VNDDDAKKAILKTNA

SEQ ID NO: 50885 - protein, 15 aa, Borrelia afzelii
NDDDAKKAILKTNAD

SEQ ID NO: 50886 - protein, 15 aa, Borrelia afzelii
DDDAKKAILKTNADK

SEQ ID NO: 50887 - protein, 15 aa, Borrelia afzelii
DDAKKAILKTNADKT

SEQ ID NO: 50888 - protein, 15 aa, Borrelia afzelii
DAKKAILKTNADKTK

SEQ ID NO: 50889 - protein, 15 aa, Borrelia afzelii
AKKAILKTNADKTKG

SEQ ID NO: 50890 - protein, 15 aa, Borrelia afzelii
KKAILKTNADKTKGA

SEQ ID NO: 50891 - protein, 15 aa, Borrelia afzelii
KAILKTNADKTKGAE

SEQ ID NO: 50892 - protein, 15 aa, Borrelia afzelii
AILKTNADKTKGAEE

SEQ ID NO: 50893 - protein, 15 aa, Borrelia afzelii
ILKTNADKTKGAEEL

SEQ ID NO: 50894 - protein, 15 aa, Borrelia afzelii
LKTNADKTKGAEELG

SEQ ID NO: 50895 - protein, 15 aa, Borrelia afzelii
KTNADKTKGAEELGK

SEQ ID NO: 50896 - protein, 15 aa, Borrelia afzelii
TNADKTKGAEELGKL

SEQ ID NO: 50897 - protein, 15 aa, Borrelia afzelii
NADKTKGAEELGKLF

SEQ ID NO: 50898 - protein, 15 aa, Borrelia afzelii
ADKTKGAEELGKLFK

SEQ ID NO: 50899 - protein, 15 aa, Borrelia afzelii
DKTKGAEELGKLFKS

SEQ ID NO: 50900 - protein, 15 aa, Borrelia afzelii
KTKGAEELGKLFKSV

SEQ ID NO: 50901 - protein, 15 aa, Borrelia afzelii
TKGAEELGKLFKSVE

SEQ ID NO: 50902 - protein, 15 aa, Borrelia afzelii
KGAEELGKLFKSVEG

SEQ ID NO: 50903 - protein, 15 aa, Borrelia afzelii
GAEELGKLFKSVEGL

SEQ ID NO: 50904 - protein, 15 aa, Borrelia afzelii
AEELGKLFKSVEGLV

SEQ ID NO: 50905 - protein, 15 aa, Borrelia afzelii
EELGKLFKSVEGLVK

SEQ ID NO: 50906 - protein, 15 aa, Borrelia afzelii
ELGKLFKSVEGLVKA

SEQ ID NO: 50907 - protein, 15 aa, Borrelia afzelii
LGKLFKSVEGLVKAA

SEQ ID NO: 50908 - protein, 15 aa, Borrelia afzelii
GKLFKSVEGLVKAAQ

SEQ ID NO: 50909 - protein, 15 aa, Borrelia afzelii
KLFKSVEGLVKAAQE

SEQ ID NO: 50910 - protein, 15 aa, Borrelia afzelii
LFKSVEGLVKAAQEA

SEQ ID NO: 50911 - protein, 15 aa, Borrelia afzelii
FKSVEGLVKAAQEAL

SEQ ID NO: 50912 - protein, 15 aa, Borrelia afzelii
KSVEGLVKAAQEALT

SEQ ID NO: 50913 - protein, 15 aa, Borrelia afzelii
SVEGLVKAAQEALTN

SEQ ID NO: 50914 - protein, 15 aa, Borrelia afzelii
VEGLVKAAQEALTNS

SEQ ID NO: 50915 - protein, 15 aa, Borrelia afzelii
EGLVKAAQEALTNSV

SEQ ID NO: 50916 - protein, 15 aa, Borrelia afzelii
GLVKAAQEALTNSVK

SEQ ID NO: 50917 - protein, 15 aa, Borrelia afzelii
LVKAAQEALTNSVKE

SEQ ID NO: 50918 - protein, 15 aa, Borrelia afzelii
VKAAQEALTNSVKEL

SEQ ID NO: 50919 - protein, 15 aa, Borrelia afzelii
KAAQEALTNSVKELT

SEQ ID NO: 50920 - protein, 15 aa, Borrelia afzelii
AAQEALTNSVKELTS

SEQ ID NO: 50921 - protein, 15 aa, Borrelia afzelii
AQEALTNSVKELTSP

SEQ ID NO: 50922 - protein, 15 aa, Borrelia afzelii
QEALTNSVKELTSPV

SEQ ID NO: 50923 - protein, 15 aa, Borrelia afzelii
EALTNSVKELTSPVV

SEQ ID NO: 50924 - protein, 15 aa, Borrelia afzelii
ALTNSVKELTSPVVA

SEQ ID NO: 50925 - protein, 15 aa, Borrelia afzelii
LTNSVKELTSPVVAE

SEQ ID NO: 50926 - protein, 15 aa, Borrelia afzelii
TNSVKELTSPVVAES

SEQ ID NO: 50927 - protein, 15 aa, Borrelia afzelii
NSVKELTSPVVAESP

SEQ ID NO: 50928 - protein, 15 aa, Borrelia afzelii
SVKELTSPVVAESPK

SEQ ID NO: 50929 - protein, 15 aa, Borrelia afzelii
VKELTSPVVAESPKK

SEQ ID NO: 50930 - protein, 15 aa, Borrelia afzelii
KELTSPVVAESPKKP

SEQ ID NO: 50931 - protein, 16 aa, Borrelia afzelii
MKKNTLSAILMTLFLF

SEQ ID NO: 50932 - protein, 16 aa, Borrelia afzelii
KKNTLSAILMTLFLFI

SEQ ID NO: 50933 - protein, 16 aa, Borrelia afzelii
KNTLSAILMTLFLFIS

SEQ ID NO: 50934 - protein, 16 aa, Borrelia afzelii
NTLSAILMTLFLFISC

SEQ ID NO: 50935 - protein, 16 aa, Borrelia afzelii
TLSAILMTLFLFISCN

SEQ ID NO: 50936 - protein, 16 aa, Borrelia afzelii
LSAILMTLFLFISCNN

SEQ ID NO: 50937 - protein, 16 aa, Borrelia afzelii
SAILMTLFLFISCNNS

SEQ ID NO: 50938 - protein, 16 aa, Borrelia afzelii
AILMTLFLFISCNNSG

SEQ ID NO: 50939 - protein, 16 aa, Borrelia afzelii
ILMTLFLFISCNNSGK

SEQ ID NO: 50940 - protein, 16 aa, Borrelia afzelii
LMTLFLFISCNNSGKG

SEQ ID NO: 50941 - protein, 16 aa, Borrelia afzelii
MTLFLFISCNNSGKGG

SEQ ID NO: 50942 - protein, 16 aa, Borrelia afzelii
TLFLFISCNNSGKGGD

SEQ ID NO: 50943 - protein, 16 aa, Borrelia afzelii
LFLFISCNNSGKGGDS

SEQ ID NO: 50944 - protein, 16 aa, Borrelia afzelii
FLFISCNNSGKGGDSA

SEQ ID NO: 50945 - protein, 16 aa, Borrelia afzelii
LFISCNNSGKGGDSAS

SEQ ID NO: 50946 - protein, 16 aa, Borrelia afzelii
FISCNNSGKGGDSAST

SEQ ID NO: 50947 - protein, 16 aa, Borrelia afzelii
ISCNNSGKGGDSASTN

SEQ ID NO: 50948 - protein, 16 aa, Borrelia afzelii
SCNNSGKGGDSASTNP

SEQ ID NO: 50949 - protein, 16 aa, Borrelia afzelii
CNNSGKGGDSASTNPA

SEQ ID NO: 50950 - protein, 16 aa, Borrelia afzelii
NNSGKGGDSASTNPAD

SEQ ID NO: 50951 - protein, 16 aa, Borrelia afzelii
NSGKGGDSASTNPADE

SEQ ID NO: 50952 - protein, 16 aa, Borrelia afzelii
SGKGGDSASTNPADES

SEQ ID NO: 50953 - protein, 16 aa, Borrelia afzelii
GKGGDSASTNPADESA

SEQ ID NO: 50954 - protein, 16 aa, Borrelia afzelii
KGGDSASTNPADESAK

SEQ ID NO: 50955 - protein, 16 aa, Borrelia afzelii
GGDSASTNPADESAKG

SEQ ID NO: 50956 - protein, 16 aa, Borrelia afzelii
GDSASTNPADESAKGP

SEQ ID NO: 50957 - protein, 16 aa, Borrelia afzelii
DSASTNPADESAKGPN

SEQ ID NO: 50958 - protein, 16 aa, Borrelia afzelii
SASTNPADESAKGPNL

SEQ ID NO: 50959 - protein, 16 aa, Borrelia afzelii
ASTNPADESAKGPNLT

SEQ ID NO: 50960 - protein, 16 aa, Borrelia afzelii
STNPADESAKGPNLTE

SEQ ID NO: 50961 - protein, 16 aa, Borrelia afzelii
TNPADESAKGPNLTEI

SEQ ID NO: 50962 - protein, 16 aa, Borrelia afzelii
NPADESAKGPNLTEIS

SEQ ID NO: 50963 - protein, 16 aa, Borrelia afzelii
PADESAKGPNLTEISK

SEQ ID NO: 50964 - protein, 16 aa, Borrelia afzelii
ADESAKGPNLTEISKK

SEQ ID NO: 50965 - protein, 16 aa, Borrelia afzelii
DESAKGPNLTEISKKI

SEQ ID NO: 50966 - protein, 16 aa, Borrelia afzelii
ESAKGPNLTEISKKIT

SEQ ID NO: 50967 - protein, 16 aa, Borrelia afzelii
SAKGPNLTEISKKITD

SEQ ID NO: 50968 - protein, 16 aa, Borrelia afzelii
AKGPNLTEISKKITDS

SEQ ID NO: 50969 - protein, 16 aa, Borrelia afzelii
KGPNLTEISKKITDSN

SEQ ID NO: 50970 - protein, 16 aa, Borrelia afzelii
GPNLTEISKKITDSNA

SEQ ID NO: 50971 - protein, 16 aa, Borrelia afzelii
PNLTEISKKITDSNAF

SEQ ID NO: 50972 - protein, 16 aa, Borrelia afzelii
NLTEISKKITDSNAFV

SEQ ID NO: 50973 - protein, 16 aa, Borrelia afzelii
LTEISKKITDSNAFVL

SEQ ID NO: 50974 - protein, 16 aa, Borrelia afzelii
TEISKKITDSNAFVLA

SEQ ID NO: 50975 - protein, 16 aa, Borrelia afzelii
EISKKITDSNAFVLAV

SEQ ID NO: 50976 - protein, 16 aa, Borrelia afzelii
ISKKITDSNAFVLAVK

SEQ ID NO: 50977 - protein, 16 aa, Borrelia afzelii
SKKITDSNAFVLAVKE

SEQ ID NO: 50978 - protein, 16 aa, Borrelia afzelii
KKITDSNAFVLAVKEV

SEQ ID NO: 50979 - protein, 16 aa, Borrelia afzelii
KITDSNAFVLAVKEVE

SEQ ID NO: 50980 - protein, 16 aa, Borrelia afzelii
ITDSNAFVLAVKEVET

SEQ ID NO: 50981 - protein, 16 aa, Borrelia afzelii
TDSNAFVLAVKEVETL

SEQ ID NO: 50982 - protein, 16 aa, Borrelia afzelii
DSNAFVLAVKEVETLV

SEQ ID NO: 50983 - protein, 16 aa, Borrelia afzelii
SNAFVLAVKEVETLVS

SEQ ID NO: 50984 - protein, 16 aa, Borrelia afzelii
NAFVLAVKEVETLVSS

SEQ ID NO: 50985 - protein, 16 aa, Borrelia afzelii
AFVLAVKEVETLVSSI

SEQ ID NO: 50986 - protein, 16 aa, Borrelia afzelii
FVLAVKEVETLVSSID

SEQ ID NO: 50987 - protein, 16 aa, Borrelia afzelii
VLAVKEVETLVSSIDE

SEQ ID NO: 50988 - protein, 16 aa, Borrelia afzelii
LAVKEVETLVSSIDEL

SEQ ID NO: 50989 - protein, 16 aa, Borrelia afzelii
AVKEVETLVSSIDELA

SEQ ID NO: 50990 - protein, 16 aa, Borrelia afzelii
VKEVETLVSSIDELAN

SEQ ID NO: 50991 - protein, 16 aa, Borrelia afzelii
KEVETLVSSIDELANK

SEQ ID NO: 50992 - protein, 16 aa, Borrelia afzelii
EVETLVSSIDELANKA

SEQ ID NO: 50993 - protein, 16 aa, Borrelia afzelii
VETLVSSIDELANKAI

SEQ ID NO: 50994 - protein, 16 aa, Borrelia afzelii
ETLVSSIDELANKAIG

SEQ ID NO: 50995 - protein, 16 aa, Borrelia afzelii
TLVSSIDELANKAIGK

SEQ ID NO: 50996 - protein, 16 aa, Borrelia afzelii
LVSSIDELANKAIGKK

SEQ ID NO: 50997 - protein, 16 aa, Borrelia afzelii
VSSIDELANKAIGKKI

SEQ ID NO: 50998 - protein, 16 aa, Borrelia afzelii
SSIDELANKAIGKKIQ

SEQ ID NO: 50999 - protein, 16 aa, Borrelia afzelii
SIDELANKAIGKKIQQ

SEQ ID NO: 51000 - protein, 16 aa, Borrelia afzelii
IDELANKAIGKKIQQN

SEQ ID NO: 51001 - protein, 16 aa, Borrelia afzelii
DELANKAIGKKIQQNG

SEQ ID NO: 51002 - protein, 16 aa, Borrelia afzelii
ELANKAIGKKIQQNGL

SEQ ID NO: 51003 - protein, 16 aa, Borrelia afzelii
LANKAIGKKIQQNGLG

SEQ ID NO: 51004 - protein, 16 aa, Borrelia afzelii
ANKAIGKKIQQNGLGA

SEQ ID NO: 51005 - protein, 16 aa, Borrelia afzelii
NKAIGKKIQQNGLGAE

SEQ ID NO: 51006 - protein, 16 aa, Borrelia afzelii
KAIGKKIQQNGLGAEA

SEQ ID NO: 51007 - protein, 16 aa, Borrelia afzelii
AIGKKIQQNGLGAEAN

SEQ ID NO: 51008 - protein, 16 aa, Borrelia afzelii
IGKKIQQNGLGAEANR

SEQ ID NO: 51009 - protein, 16 aa, Borrelia afzelii
GKKIQQNGLGAEANRN

SEQ ID NO: 51010 - protein, 16 aa, Borrelia afzelii
KKIQQNGLGAEANRNE

SEQ ID NO: 51011 - protein, 16 aa, Borrelia afzelii
KIQQNGLGAEANRNES

SEQ ID NO: 51012 - protein, 16 aa, Borrelia afzelii
IQQNGLGAEANRNESL

SEQ ID NO: 51013 - protein, 16 aa, Borrelia afzelii
QQNGLGAEANRNESLL

SEQ ID NO: 51014 - protein, 16 aa, Borrelia afzelii
QNGLGAEANRNESLLA

SEQ ID NO: 51015 - protein, 16 aa, Borrelia afzelii
NGLGAEANRNESLLAG

SEQ ID NO: 51016 - protein, 16 aa, Borrelia afzelii
GLGAEANRNESLLAGV

SEQ ID NO: 51017 - protein, 16 aa, Borrelia afzelii
LGAEANRNESLLAGVH

SEQ ID NO: 51018 - protein, 16 aa, Borrelia afzelii
GAEANRNESLLAGVHE

SEQ ID NO: 51019 - protein, 16 aa, Borrelia afzelii
AEANRNESLLAGVHEI

SEQ ID NO: 51020 - protein, 16 aa, Borrelia afzelii
EANRNESLLAGVHEIS

SEQ ID NO: 51021 - protein, 16 aa, Borrelia afzelii
ANRNESLLAGVHEIST

SEQ ID NO: 51022 - protein, 16 aa, Borrelia afzelii
NRNESLLAGVHEISTL

SEQ ID NO: 51023 - protein, 16 aa, Borrelia afzelii
RNESLLAGVHEISTLI

SEQ ID NO: 51024 - protein, 16 aa, Borrelia afzelii
NESLLAGVHEISTLIT

SEQ ID NO: 51025 - protein, 16 aa, Borrelia afzelii
ESLLAGVHEISTLITE

SEQ ID NO: 51026 - protein, 16 aa, Borrelia afzelii
SLLAGVHEISTLITEK

SEQ ID NO: 51027 - protein, 16 aa, Borrelia afzelii
LLAGVHEISTLITEKL

SEQ ID NO: 51028 - protein, 16 aa, Borrelia afzelii
LAGVHEISTLITEKLS

SEQ ID NO: 51029 - protein, 16 aa, Borrelia afzelii
AGVHEISTLITEKLSK

SEQ ID NO: 51030 - protein, 16 aa, Borrelia afzelii
GVHEISTLITEKLSKL

SEQ ID NO: 51031 - protein, 16 aa, Borrelia afzelii
VHEISTLITEKLSKLK

SEQ ID NO: 51032 - protein, 16 aa, Borrelia afzelii
HEISTLITEKLSKLKN

SEQ ID NO: 51033 - protein, 16 aa, Borrelia afzelii
EISTLITEKLSKLKNS

SEQ ID NO: 51034 - protein, 16 aa, Borrelia afzelii
ISTLITEKLSKLKNSG

SEQ ID NO: 51035 - protein, 16 aa, Borrelia afzelii
STLITEKLSKLKNSGE

SEQ ID NO: 51036 - protein, 16 aa, Borrelia afzelii
TLITEKLSKLKNSGEL

SEQ ID NO: 51037 - protein, 16 aa, Borrelia afzelii
LITEKLSKLKNSGELK

SEQ ID NO: 51038 - protein, 16 aa, Borrelia afzelii
ITEKLSKLKNSGELKA

SEQ ID NO: 51039 - protein, 16 aa, Borrelia afzelii
TEKLSKLKNSGELKAK

SEQ ID NO: 51040 - protein, 16 aa, Borrelia afzelii
EKLSKLKNSGELKAKI

SEQ ID NO: 51041 - protein, 16 aa, Borrelia afzelii
KLSKLKNSGELKAKIE

SEQ ID NO: 51042 - protein, 16 aa, Borrelia afzelii
LSKLKNSGELKAKIED

SEQ ID NO: 51043 - protein, 16 aa, Borrelia afzelii
SKLKNSGELKAKIEDA

SEQ ID NO: 51044 - protein, 16 aa, Borrelia afzelii
KLKNSGELKAKIEDAK

SEQ ID NO: 51045 - protein, 16 aa, Borrelia afzelii
LKNSGELKAKIEDAKK

SEQ ID NO: 51046 - protein, 16 aa, Borrelia afzelii
KNSGELKAKIEDAKKC

SEQ ID NO: 51047 - protein, 16 aa, Borrelia afzelii
NSGELKAKIEDAKKCS

SEQ ID NO: 51048 - protein, 16 aa, Borrelia afzelii
SGELKAKIEDAKKCSE

SEQ ID NO: 51049 - protein, 16 aa, Borrelia afzelii
GELKAKIEDAKKCSEE

SEQ ID NO: 51050 - protein, 16 aa, Borrelia afzelii
ELKAKIEDAKKCSEEF

SEQ ID NO: 51051 - protein, 16 aa, Borrelia afzelii
LKAKIEDAKKCSEEFT

SEQ ID NO: 51052 - protein, 16 aa, Borrelia afzelii
KAKIEDAKKCSEEFTN

SEQ ID NO: 51053 - protein, 16 aa, Borrelia afzelii
AKIEDAKKCSEEFTNK

SEQ ID NO: 51054 - protein, 16 aa, Borrelia afzelii
KIEDAKKCSEEFTNKL

SEQ ID NO: 51055 - protein, 16 aa, Borrelia afzelii
IEDAKKCSEEFTNKLR

SEQ ID NO: 51056 - protein, 16 aa, Borrelia afzelii
EDAKKCSEEFTNKLRV

SEQ ID NO: 51057 - protein, 16 aa, Borrelia afzelii
DAKKCSEEFTNKLRVS

SEQ ID NO: 51058 - protein, 16 aa, Borrelia afzelii
AKKCSEEFTNKLRVSH

SEQ ID NO: 51059 - protein, 16 aa, Borrelia afzelii
KKCSEEFTNKLRVSHA

SEQ ID NO: 51060 - protein, 16 aa, Borrelia afzelii
KCSEEFTNKLRVSHAD

SEQ ID NO: 51061 - protein, 16 aa, Borrelia afzelii
CSEEFTNKLRVSHADL

SEQ ID NO: 51062 - protein, 16 aa, Borrelia afzelii
SEEFTNKLRVSHADLG

SEQ ID NO: 51063 - protein, 16 aa, Borrelia afzelii
EEFTNKLRVSHADLGK

SEQ ID NO: 51064 - protein, 16 aa, Borrelia afzelii
EFTNKLRVSHADLGKQ

SEQ ID NO: 51065 - protein, 16 aa, Borrelia afzelii
FTNKLRVSHADLGKQG

SEQ ID NO: 51066 - protein, 16 aa, Borrelia afzelii
TNKLRVSHADLGKQGV

SEQ ID NO: 51067 - protein, 16 aa, Borrelia afzelii
NKLRVSHADLGKQGVN

SEQ ID NO: 51068 - protein, 16 aa, Borrelia afzelii
KLRVSHADLGKQGVND

SEQ ID NO: 51069 - protein, 16 aa, Borrelia afzelii
LRVSHADLGKQGVNDD

SEQ ID NO: 51070 - protein, 16 aa, Borrelia afzelii
RVSHADLGKQGVNDDD

SEQ ID NO: 51071 - protein, 16 aa, Borrelia afzelii
VSHADLGKQGVNDDDA

SEQ ID NO: 51072 - protein, 16 aa, Borrelia afzelii
SHADLGKQGVNDDDAK

SEQ ID NO: 51073 - protein, 16 aa, Borrelia afzelii
HADLGKQGVNDDDAKK

SEQ ID NO: 51074 - protein, 16 aa, Borrelia afzelii
ADLGKQGVNDDDAKKA

SEQ ID NO: 51075 - protein, 16 aa, Borrelia afzelii
DLGKQGVNDDDAKKAI

SEQ ID NO: 51076 - protein, 16 aa, Borrelia afzelii
LGKQGVNDDDAKKAIL

SEQ ID NO: 51077 - protein, 16 aa, Borrelia afzelii
GKQGVNDDDAKKAILK

SEQ ID NO: 51078 - protein, 16 aa, Borrelia afzelii
KQGVNDDDAKKAILKT

SEQ ID NO: 51079 - protein, 16 aa, Borrelia afzelii
QGVNDDDAKKAILKTN

SEQ ID NO: 51080 - protein, 16 aa, Borrelia afzelii
GVNDDDAKKAILKTNA

SEQ ID NO: 51081 - protein, 16 aa, Borrelia afzelii
VNDDDAKKAILKTNAD

SEQ ID NO: 51082 - protein, 16 aa, Borrelia afzelii
NDDDAKKAILKTNADK

SEQ ID NO: 51083 - protein, 16 aa, Borrelia afzelii
DDDAKKAILKTNADKT

SEQ ID NO: 51084 - protein, 16 aa, Borrelia afzelii
DDAKKAILKTNADKTK

SEQ ID NO: 51085 - protein, 16 aa, Borrelia afzelii
DAKKAILKTNADKTKG

SEQ ID NO: 51086 - protein, 16 aa, Borrelia afzelii
AKKAILKTNADKTKGA

SEQ ID NO: 51087 - protein, 16 aa, Borrelia afzelii
KKAILKTNADKTKGAE

SEQ ID NO: 51088 - protein, 16 aa, Borrelia afzelii
KAILKTNADKTKGAEE

SEQ ID NO: 51089 - protein, 16 aa, Borrelia afzelii
AILKTNADKTKGAEEL

SEQ ID NO: 51090 - protein, 16 aa, Borrelia afzelii
ILKTNADKTKGAEELG

SEQ ID NO: 51091 - protein, 16 aa, Borrelia afzelii
LKTNADKTKGAEELGK

SEQ ID NO: 51092 - protein, 16 aa, Borrelia afzelii
KTNADKTKGAEELGKL

SEQ ID NO: 51093 - protein, 16 aa, Borrelia afzelii
TNADKTKGAEELGKLF

SEQ ID NO: 51094 - protein, 16 aa, Borrelia afzelii
NADKTKGAEELGKLFK

SEQ ID NO: 51095 - protein, 16 aa, Borrelia afzelii
ADKTKGAEELGKLFKS

SEQ ID NO: 51096 - protein, 16 aa, Borrelia afzelii
DKTKGAEELGKLFKSV

SEQ ID NO: 51097 - protein, 16 aa, Borrelia afzelii
KTKGAEELGKLFKSVE

SEQ ID NO: 51098 - protein, 16 aa, Borrelia afzelii
TKGAEELGKLFKSVEG

SEQ ID NO: 51099 - protein, 16 aa, Borrelia afzelii
KGAEELGKLFKSVEGL

SEQ ID NO: 51100 - protein, 16 aa, Borrelia afzelii
GAEELGKLFKSVEGLV

SEQ ID NO: 51101 - protein, 16 aa, Borrelia afzelii
AEELGKLFKSVEGLVK

SEQ ID NO: 51102 - protein, 16 aa, Borrelia afzelii
EELGKLFKSVEGLVKA

SEQ ID NO: 51103 - protein, 16 aa, Borrelia afzelii
ELGKLFKSVEGLVKAA

SEQ ID NO: 51104 - protein, 16 aa, Borrelia afzelii
LGKLFKSVEGLVKAAQ

SEQ ID NO: 51105 - protein, 16 aa, Borrelia afzelii
GKLFKSVEGLVKAAQE

SEQ ID NO: 51106 - protein, 16 aa, Borrelia afzelii
KLFKSVEGLVKAAQEA

SEQ ID NO: 51107 - protein, 16 aa, Borrelia afzelii
LFKSVEGLVKAAQEAL

SEQ ID NO: 51108 - protein, 16 aa, Borrelia afzelii
FKSVEGLVKAAQEALT

SEQ ID NO: 51109 - protein, 16 aa, Borrelia afzelii
KSVEGLVKAAQEALTN

SEQ ID NO: 51110 - protein, 16 aa, Borrelia afzelii
SVEGLVKAAQEALTNS

SEQ ID NO: 51111 - protein, 16 aa, Borrelia afzelii
VEGLVKAAQEALTNSV

SEQ ID NO: 51112 - protein, 16 aa, Borrelia afzelii
EGLVKAAQEALTNSVK

SEQ ID NO: 51113 - protein, 16 aa, Borrelia afzelii
GLVKAAQEALTNSVKE

SEQ ID NO: 51114 - protein, 16 aa, Borrelia afzelii
LVKAAQEALTNSVKEL

SEQ ID NO: 51115 - protein, 16 aa, Borrelia afzelii
VKAAQEALTNSVKELT

SEQ ID NO: 51116 - protein, 16 aa, Borrelia afzelii
KAAQEALTNSVKELTS

SEQ ID NO: 51117 - protein, 16 aa, Borrelia afzelii
AAQEALTNSVKELTSP

SEQ ID NO: 51118 - protein, 16 aa, Borrelia afzelii
AQEALTNSVKELTSPV

SEQ ID NO: 51119 - protein, 16 aa, Borrelia afzelii
QEALTNSVKELTSPVV

SEQ ID NO: 51120 - protein, 16 aa, Borrelia afzelii
EALTNSVKELTSPVVA

SEQ ID NO: 51121 - protein, 16 aa, Borrelia afzelii
ALTNSVKELTSPVVAE

SEQ ID NO: 51122 - protein, 16 aa, Borrelia afzelii
LTNSVKELTSPVVAES

SEQ ID NO: 51123 - protein, 16 aa, Borrelia afzelii
TNSVKELTSPVVAESP

SEQ ID NO: 51124 - protein, 16 aa, Borrelia afzelii
NSVKELTSPVVAESPK

SEQ ID NO: 51125 - protein, 16 aa, Borrelia afzelii
SVKELTSPVVAESPKK

SEQ ID NO: 51126 - protein, 16 aa, Borrelia afzelii
VKELTSPVVAESPKKP

SEQ ID NO: 51127 - protein, 9 aa, Borrelia burgdorferi
YLLGIGLIL

SEQ ID NO: 51128 - protein, 9 aa, Borrelia burgdorferi
FTLEGTLAA

SEQ ID NO: 51129 - protein, 9 aa, Borrelia burgdorferi
KTSTLTISV

SEQ ID NO: 51130 - protein, 9 aa, Borrelia burgdorferi
FTKEDTITV

SEQ ID NO: 51131 - protein, 9 aa, Borrelia burgdorferi
ALIACKQNV

SEQ ID NO: 51132 - protein, 9 aa, Borrelia burgdorferi
LLGIGLILA

SEQ ID NO: 51133 - protein, 9 aa, Borrelia burgdorferi
SLEATVDKL

SEQ ID NO: 51134 - protein, 9 aa, Borrelia burgdorferi
ILKSGEITV

SEQ ID NO: 51135 - protein, 9 aa, Borrelia burgdorferi
KVTEGTVVL

SEQ ID NO: 51136 - protein, 9 aa, Borrelia burgdorferi
STLDEKNSV

SEQ ID NO: 51137 - protein, 9 aa, Borrelia burgdorferi
TLVSKKVTL

SEQ ID NO: 51138 - protein, 9 aa, Borrelia burgdorferi
GIGLILALI

SEQ ID NO: 51139 - protein, 10 aa, Borrelia burgdorferi
YLLGIGLILA

SEQ ID NO: 51140 - protein, 10 aa, Borrelia burgdorferi
TLDEKNSVSV

SEQ ID NO: 51141 - protein, 10 aa, Borrelia burgdorferi
ALDDSDTTQA

SEQ ID NO: 51142 - protein, 10 aa, Borrelia burgdorferi
LLGIGLILAL

SEQ ID NO: 51143 - protein, 10 aa, Borrelia burgdorferi
NILKSGEITV

SEQ ID NO: 51144 - protein, 10 aa, Borrelia burgdorferi
TLAADGKTTL

SEQ ID NO: 51145 - protein, 10 aa, Borrelia burgdorferi
VLKDFTLEGT

SEQ ID NO: 51146 - protein, 10 aa, Borrelia burgdorferi
YSLEATVDKL

SEQ ID NO: 51147 - protein, 11 aa, Borrelia burgdorferi
YLLGIGLILAL

SEQ ID NO: 51148 - protein, 11 aa, Borrelia burgdorferi
LVFTKEDTITV

SEQ ID NO: 51149 - protein, 11 aa, Borrelia burgdorferi
LLGIGLILALI

SEQ ID NO: 51150 - protein, 11 aa, Borrelia burgdorferi
ILALIACKQNV

SEQ ID NO: 51151 - protein, 11 aa, Borrelia burgdorferi
STLDEKNSVSV

SEQ ID NO: 51152 - protein, 11 aa, Borrelia burgdorferi
ALDDSDTTQAT

SEQ ID NO: 51153 - protein, 11 aa, Borrelia burgdorferi
VLKDFTLEGTL

SEQ ID NO: 51154 - protein, 11 aa, Borrelia burgdorferi
SLEATVDKLEL

SEQ ID NO: 51155 - protein, 11 aa, Borrelia burgdorferi
ILKSGEITVAL

SEQ ID NO: 51156 - protein, 11 aa, Borrelia burgdorferi
ALIACKQNVST

SEQ ID NO: 51157 - protein, 11 aa, Borrelia burgdorferi
TTLKVTEGTVV

SEQ ID NO: 51158 - protein, 11 aa, Borrelia burgdorferi
LAADGKTTLKV

SEQ ID NO: 51159 - protein, 11 aa, Borrelia burgdorferi
LIACKQNVSTL

SEQ ID NO: 51160 - protein, 9 aa, Borrelia burgdorferi
VVLSKNILK

SEQ ID NO: 51161 - protein, 9 aa, Borrelia burgdorferi
KTKNLVFTK

SEQ ID NO: 51162 - protein, 9 aa, Borrelia burgdorferi
LVSKKVTLK

SEQ ID NO: 51163 - protein, 9 aa, Borrelia burgdorferi
LILALIACK

SEQ ID NO: 51164 - protein, 9 aa, Borrelia burgdorferi
LTISVNSQK

SEQ ID NO: 51165 - protein, 9 aa, Borrelia burgdorferi
KAVEITTLK

SEQ ID NO: 51166 - protein, 9 aa, Borrelia burgdorferi
AADGKTTLK

SEQ ID NO: 51167 - protein, 9 aa, Borrelia burgdorferi
ISVNSQKTK

SEQ ID NO: 51168 - protein, 9 aa, Borrelia burgdorferi
RANGTRLEY

SEQ ID NO: 51169 - protein, 9 aa, Borrelia burgdorferi
SQTKFEIFK

SEQ ID NO: 51170 - protein, 9 aa, Borrelia burgdorferi
KSDGSGKAK

SEQ ID NO: 51171 - protein, 9 aa, Borrelia burgdorferi
TQATKKTGK

SEQ ID NO: 51172 - protein, 9 aa, Borrelia burgdorferi
MTELVSKEK

SEQ ID NO: 51173 - protein, 10 aa, Borrelia burgdorferi
TLVSKKVTLK

SEQ ID NO: 51174 - protein, 10 aa, Borrelia burgdorferi
TLTISVNSQK

SEQ ID NO: 51175 - protein, 10 aa, Borrelia burgdorferi
TVVLSKNILK

SEQ ID NO: 51176 - protein, 10 aa, Borrelia burgdorferi
GLILALIACK

SEQ ID NO: 51177 - protein, 10 aa, Borrelia burgdorferi
TLKELKNALK

SEQ ID NO: 51178 - protein, 10 aa, Borrelia burgdorferi
LSQTKFEIFK

SEQ ID NO: 51179 - protein, 10 aa, Borrelia burgdorferi
LAADGKTTLK

SEQ ID NO: 51180 - protein, 10 aa, Borrelia burgdorferi
VTEGTVVLSK

SEQ ID NO: 51181 - protein, 10 aa, Borrelia burgdorferi
KLELKGTSDK

SEQ ID NO: 51182 - protein, 10 aa, Borrelia burgdorferi
TTQATKKTGK

SEQ ID NO: 51183 - protein, 10 aa, Borrelia burgdorferi
GMTELVSKEK

SEQ ID NO: 51184 - protein, 10 aa, Borrelia burgdorferi
KYSLEATVDK

SEQ ID NO: 51185 - protein, 10 aa, Borrelia burgdorferi
KQNVSTLDEK

SEQ ID NO: 51186 - protein, 10 aa, Borrelia burgdorferi
TIADDLSQTK

SEQ ID NO: 51187 - protein, 10 aa, Borrelia burgdorferi
TISVNSQKTK

SEQ ID NO: 51188 - protein, 10 aa, Borrelia burgdorferi
KEDAKTLVSK

SEQ ID NO: 51189 - protein, 10 aa, Borrelia burgdorferi
GSGKAKEVLK

SEQ ID NO: 51190 - protein, 10 aa, Borrelia burgdorferi
KTIVRANGTR

SEQ ID NO: 51191 - protein, 10 aa, Borrelia burgdorferi
GTLEGEKTDK

SEQ ID NO: 51192 - protein, 10 aa, Borrelia burgdorferi
GKAVEITTLK

SEQ ID NO: 51193 - protein, 10 aa, Borrelia burgdorferi
GTRLEYTDIK

SEQ ID NO: 51194 - protein, 10 aa, Borrelia burgdorferi
VSKKVTLKDK

SEQ ID NO: 51195 - protein, 10 aa, Borrelia burgdorferi
IKSDGSGKAK

SEQ ID NO: 51196 - protein, 11 aa, Borrelia burgdorferi
TLAADGKTTLK

SEQ ID NO: 51197 - protein, 11 aa, Borrelia burgdorferi
STLTISVNSQK

SEQ ID NO: 51198 - protein, 11 aa, Borrelia burgdorferi
KTLVSKKVTLK

SEQ ID NO: 51199 - protein, 11 aa, Borrelia burgdorferi
KVTEGTVVLSK

SEQ ID NO: 51200 - protein, 11 aa, Borrelia burgdorferi
TTLKELKNALK

SEQ ID NO: 51201 - protein, 11 aa, Borrelia burgdorferi
LTISVNSQKTK

SEQ ID NO: 51202 - protein, 11 aa, Borrelia burgdorferi
GTVVLSKNILK

SEQ ID NO: 51203 - protein, 11 aa, Borrelia burgdorferi
FTKEDTITVQK

SEQ ID NO: 51204 - protein, 11 aa, Borrelia burgdorferi
IVRANGTRLEY

SEQ ID NO: 51205 - protein, 11 aa, Borrelia burgdorferi
TLKDKSSTEEK

SEQ ID NO: 51206 - protein, 11 aa, Borrelia burgdorferi
LVSKKVTLKDK

SEQ ID NO: 51207 - protein, 11 aa, Borrelia burgdorferi
KFNEKGETSEK

SEQ ID NO: 51208 - protein, 11 aa, Borrelia burgdorferi
LTIADDLSQTK

SEQ ID NO: 51209 - protein, 11 aa, Borrelia burgdorferi
SQKTKNLVFTK

SEQ ID NO: 51210 - protein, 11 aa, Borrelia burgdorferi
KSSTEEKFNEK

SEQ ID NO: 51211 - protein, 11 aa, Borrelia burgdorferi
ATKKTGKWDSK

SEQ ID NO: 51212 - protein, 9 aa, Borrelia burgdorferi
VVLSKNILK

SEQ ID NO: 51213 - protein, 9 aa, Borrelia burgdorferi
KTKNLVFTK

SEQ ID NO: 51214 - protein, 9 aa, Borrelia burgdorferi
SQTKFEIFK

SEQ ID NO: 51215 - protein, 9 aa, Borrelia burgdorferi
LTISVNSQK

SEQ ID NO: 51216 - protein, 9 aa, Borrelia burgdorferi
ATVDKLELK

SEQ ID NO: 51217 - protein, 9 aa, Borrelia burgdorferi
LILALIACK

SEQ ID NO: 51218 - protein, 9 aa, Borrelia burgdorferi
STEEKFNEK

SEQ ID NO: 51219 - protein, 9 aa, Borrelia burgdorferi
KAVEITTLK

SEQ ID NO: 51220 - protein, 9 aa, Borrelia burgdorferi
LVSKKVTLK

SEQ ID NO: 51221 - protein, 9 aa, Borrelia burgdorferi
MTELVSKEK

SEQ ID NO: 51222 - protein, 9 aa, Borrelia burgdorferi
AADGKTTLK

SEQ ID NO: 51223 - protein, 9 aa, Borrelia burgdorferi
SAGTNLEGK

SEQ ID NO: 51224 - protein, 9 aa, Borrelia burgdorferi
YSLEATVDK

SEQ ID NO: 51225 - protein, 9 aa, Borrelia burgdorferi
GSGTLEGEK

SEQ ID NO: 51226 - protein, 9 aa, Borrelia burgdorferi
TQATKKTGK

SEQ ID NO: 51227 - protein, 9 aa, Borrelia burgdorferi
RANGTRLEY

SEQ ID NO: 51228 - protein, 9 aa, Borrelia burgdorferi
IADDLSQTK

SEQ ID NO: 51229 - protein, 9 aa, Borrelia burgdorferi
ISVNSQKTK

SEQ ID NO: 51230 - protein, 9 aa, Borrelia burgdorferi
KSDGSGKAK

SEQ ID NO: 51231 - protein, 9 aa, Borrelia burgdorferi
GGMTELVSK

SEQ ID NO: 51232 - protein, 9 aa, Borrelia burgdorferi
TEGTVVLSK

SEQ ID NO: 51233 - protein, 9 aa, Borrelia burgdorferi
EITTLKELK

SEQ ID NO: 51234 - protein, 9 aa, Borrelia burgdorferi
TIVRANGTR

SEQ ID NO: 51235 - protein, 10 aa, Borrelia burgdorferi
TVVLSKNILK

SEQ ID NO: 51236 - protein, 10 aa, Borrelia burgdorferi
TTQATKKTGK

SEQ ID NO: 51237 - protein, 10 aa, Borrelia burgdorferi
TIADDLSQTK

SEQ ID NO: 51238 - protein, 10 aa, Borrelia burgdorferi
VTEGTVVLSK

SEQ ID NO: 51239 - protein, 10 aa, Borrelia burgdorferi
LSQTKFEIFK

SEQ ID NO: 51240 - protein, 10 aa, Borrelia burgdorferi
SSTEEKFNEK

SEQ ID NO: 51241 - protein, 10 aa, Borrelia burgdorferi
GLILALIACK

SEQ ID NO: 51242 - protein, 10 aa, Borrelia burgdorferi
KQNVSTLDEK

SEQ ID NO: 51243 - protein, 10 aa, Borrelia burgdorferi
TLTISVNSQK

SEQ ID NO: 51244 - protein, 10 aa, Borrelia burgdorferi
TLVSKKVTLK

SEQ ID NO: 51245 - protein, 10 aa, Borrelia burgdorferi
TISVNSQKTK

SEQ ID NO: 51246 - protein, 10 aa, Borrelia burgdorferi
LAADGKTTLK

SEQ ID NO: 51247 - protein, 10 aa, Borrelia burgdorferi
GMTELVSKEK

SEQ ID NO: 51248 - protein, 10 aa, Borrelia burgdorferi
TLKELKNALK

SEQ ID NO: 51249 - protein, 10 aa, Borrelia burgdorferi
KTIVRANGTR

SEQ ID NO: 51250 - protein, 10 aa, Borrelia burgdorferi
GSGKAKEVLK

SEQ ID NO: 51251 - protein, 10 aa, Borrelia burgdorferi
GTLEGEKTDK

SEQ ID NO: 51252 - protein, 10 aa, Borrelia burgdorferi
VSKKVTLKDK

SEQ ID NO: 51253 - protein, 10 aa, Borrelia burgdorferi
GTRLEYTDIK

SEQ ID NO: 51254 - protein, 10 aa, Borrelia burgdorferi
KLELKGTSDK

SEQ ID NO: 51255 - protein, 10 aa, Borrelia burgdorferi
DSAGTNLEGK

SEQ ID NO: 51256 - protein, 11 aa, Borrelia burgdorferi
STLTISVNSQK

SEQ ID NO: 51257 - protein, 11 aa, Borrelia burgdorferi
TTLKELKNALK

SEQ ID NO: 51258 - protein, 11 aa, Borrelia burgdorferi
KVTEGTVVLSK

SEQ ID NO: 51259 - protein, 11 aa, Borrelia burgdorferi
KTLVSKKVTLK

SEQ ID NO: 51260 - protein, 11 aa, Borrelia burgdorferi
GTVVLSKNILK

SEQ ID NO: 51261 - protein, 11 aa, Borrelia burgdorferi
LTIADDLSQTK

SEQ ID NO: 51262 - protein, 11 aa, Borrelia burgdorferi
TLAADGKTTLK

SEQ ID NO: 51263 - protein, 11 aa, Borrelia burgdorferi
AVEITTLKELK

SEQ ID NO: 51264 - protein, 11 aa, Borrelia burgdorferi
LTISVNSQKTK

SEQ ID NO: 51265 - protein, 11 aa, Borrelia burgdorferi
SQKTKNLVFTK

SEQ ID NO: 51266 - protein, 11 aa, Borrelia burgdorferi
KSSTEEKFNEK

SEQ ID NO: 51267 - protein, 11 aa, Borrelia burgdorferi
ATKKTGKWDSK

SEQ ID NO: 51268 - protein, 11 aa, Borrelia burgdorferi
TLKDKSSTEEK

SEQ ID NO: 51269 - protein, 11 aa, Borrelia burgdorferi
FTKEDTITVQK

SEQ ID NO: 51270 - protein, 11 aa, Borrelia burgdorferi
TLEGTLAADGK

SEQ ID NO: 51271 - protein, 11 aa, Borrelia burgdorferi
LVSKKVTLKDK

SEQ ID NO: 51272 - protein, 11 aa, Borrelia burgdorferi
MTELVSKEKDK

SEQ ID NO: 51273 - protein, 11 aa, Borrelia burgdorferi
DLSQTKFEIFK

SEQ ID NO: 51274 - protein, 11 aa, Borrelia burgdorferi
YTDIKSDGSGK

SEQ ID NO: 51275 - protein, 11 aa, Borrelia burgdorferi
LVSKEKDKDGK

SEQ ID NO: 51276 - protein, 11 aa, Borrelia burgdorferi
KFNEKGETSEK

SEQ ID NO: 51277 - protein, 11 aa, Borrelia burgdorferi
IGLILALIACK

SEQ ID NO: 51278 - protein, 9 aa, Borrelia burgdorferi
KYLLGIGLI

SEQ ID NO: 51279 - protein, 9 aa, Borrelia burgdorferi
KWDSKTSTL

SEQ ID NO: 51280 - protein, 9 aa, Borrelia burgdorferi
KYDSAGTNL

SEQ ID NO: 51281 - protein, 10 aa, Borrelia burgdorferi
KYLLGIGLIL

SEQ ID NO: 51282 - protein, 11 aa, Borrelia burgdorferi
KWDSKTSTLTI

SEQ ID NO: 51283 - protein, 11 aa, Borrelia burgdorferi
KYSLEATVDKL

SEQ ID NO: 51284 - protein, 11 aa, Borrelia burgdorferi
IVRANGTRLEY

SEQ ID NO: 51285 - protein, 11 aa, Borrelia burgdorferi
TIADDLSQTKF

SEQ ID NO: 51286 - protein, 9 aa, Borrelia burgdorferi
LTISVNSQK

SEQ ID NO: 51287 - protein, 9 aa, Borrelia burgdorferi
ETSEKTIVR

SEQ ID NO: 51288 - protein, 9 aa, Borrelia burgdorferi
MTELVSKEK

SEQ ID NO: 51289 - protein, 9 aa, Borrelia burgdorferi
EITTLKELK

SEQ ID NO: 51290 - protein, 9 aa, Borrelia burgdorferi
TIVRANGTR

SEQ ID NO: 51291 - protein, 9 aa, Borrelia burgdorferi
KAVEITTLK

SEQ ID NO: 51292 - protein, 9 aa, Borrelia burgdorferi
DAKTLVSKK

SEQ ID NO: 51293 - protein, 9 aa, Borrelia burgdorferi
KTKNLVFTK

SEQ ID NO: 51294 - protein, 9 aa, Borrelia burgdorferi
STEEKFNEK

SEQ ID NO: 51295 - protein, 9 aa, Borrelia burgdorferi
ATVDKLELK

SEQ ID NO: 51296 - protein, 9 aa, Borrelia burgdorferi
LVSKKVTLK

SEQ ID NO: 51297 - protein, 9 aa, Borrelia burgdorferi
SQTKFEIFK

SEQ ID NO: 51298 - protein, 9 aa, Borrelia burgdorferi
YSLEATVDK

SEQ ID NO: 51299 - protein, 9 aa, Borrelia burgdorferi
EGTLAADGK

SEQ ID NO: 51300 - protein, 9 aa, Borrelia burgdorferi
ISVNSQKTK

SEQ ID NO: 51301 - protein, 9 aa, Borrelia burgdorferi
LILALIACK

SEQ ID NO: 51302 - protein, 9 aa, Borrelia burgdorferi
DIKSDGSGK

SEQ ID NO: 51303 - protein, 9 aa, Borrelia burgdorferi
VVLSKNILK

SEQ ID NO: 51304 - protein, 9 aa, Borrelia burgdorferi
EDAKTLVSK

SEQ ID NO: 51305 - protein, 9 aa, Borrelia burgdorferi
DSDTTQATK

SEQ ID NO: 51306 - protein, 9 aa, Borrelia burgdorferi
SAGTNLEGK

SEQ ID NO: 51307 - protein, 10 aa, Borrelia burgdorferi
TVVLSKNILK

SEQ ID NO: 51308 - protein, 10 aa, Borrelia burgdorferi
TLTISVNSQK

SEQ ID NO: 51309 - protein, 10 aa, Borrelia burgdorferi
EATVDKLELK

SEQ ID NO: 51310 - protein, 10 aa, Borrelia burgdorferi
TIADDLSQTK

SEQ ID NO: 51311 - protein, 10 aa, Borrelia burgdorferi
DSAGTNLEGK

SEQ ID NO: 51312 - protein, 10 aa, Borrelia burgdorferi
TTQATKKTGK

SEQ ID NO: 51313 - protein, 10 aa, Borrelia burgdorferi
LAADGKTTLK

SEQ ID NO: 51314 - protein, 10 aa, Borrelia burgdorferi
KTIVRANGTR

SEQ ID NO: 51315 - protein, 10 aa, Borrelia burgdorferi
TISVNSQKTK

SEQ ID NO: 51316 - protein, 10 aa, Borrelia burgdorferi
TLVSKKVTLK

SEQ ID NO: 51317 - protein, 10 aa, Borrelia burgdorferi
SSTEEKFNEK

SEQ ID NO: 51318 - protein, 10 aa, Borrelia burgdorferi
TLKELKNALK

SEQ ID NO: 51319 - protein, 10 aa, Borrelia burgdorferi
LSQTKFEIFK

SEQ ID NO: 51320 - protein, 10 aa, Borrelia burgdorferi
VTEGTVVLSK

SEQ ID NO: 51321 - protein, 10 aa, Borrelia burgdorferi
EDAKTLVSKK

SEQ ID NO: 51322 - protein, 10 aa, Borrelia burgdorferi
DSDTTQATKK

SEQ ID NO: 51323 - protein, 10 aa, Borrelia burgdorferi
GLILALIACK

SEQ ID NO: 51324 - protein, 9 aa, Borrelia burgdorferi
IVRANGTRL

SEQ ID NO: 51325 - protein, 9 aa, Borrelia burgdorferi
KVTEGTVVL

SEQ ID NO: 51326 - protein, 9 aa, Borrelia burgdorferi
LAADGKTTL

SEQ ID NO: 51327 - protein, 9 aa, Borrelia burgdorferi
LPGGMTELV

SEQ ID NO: 51328 - protein, 9 aa, Borrelia burgdorferi
TVVLSKNIL

SEQ ID NO: 51329 - protein, 11 aa, Borrelia burgdorferi
KAVEITTLKEL

SEQ ID NO: 51330 - protein, 9 aa, Borrelia burgdorferi
TLKELKNAL

SEQ ID NO: 51331 - protein, 11 aa, Borrelia burgdorferi
ILKSGEITVAL

SEQ ID NO: 51332 - protein, 11 aa, Borrelia burgdorferi
YLLGIGLILAL

SEQ ID NO: 51333 - protein, 11 aa, Borrelia burgdorferi
TLKVTEGTVVL

SEQ ID NO: 51334 - protein, 9 aa, Borrelia burgdorferi
SQKTKNLVF

SEQ ID NO: 51335 - protein, 9 aa, Borrelia burgdorferi
RANGTRLEY

SEQ ID NO: 51336 - protein, 9 aa, Borrelia burgdorferi
YLLGIGLIL

SEQ ID NO: 51337 - protein, 9 aa, Borrelia burgdorferi
KVTEGTVVL

SEQ ID NO: 51338 - protein, 9 aa, Borrelia burgdorferi
TLKELKNAL

SEQ ID NO: 51339 - protein, 9 aa, Borrelia burgdorferi
KAKEVLKDF

SEQ ID NO: 51340 - protein, 9 aa, Borrelia burgdorferi
IVRANGTRL

SEQ ID NO: 51341 - protein, 9 aa, Borrelia burgdorferi
LGIGLILAL

SEQ ID NO: 51342 - protein, 10 aa, Borrelia burgdorferi
TLAADGKTTL

SEQ ID NO: 51343 - protein, 11 aa, Borrelia burgdorferi
IVRANGTRLEY

SEQ ID NO: 51344 - protein, 11 aa, Borrelia burgdorferi
YLLGIGLILAL

SEQ ID NO: 51345 - protein, 11 aa, Borrelia burgdorferi
VQKYDSAGTNL

SEQ ID NO: 51346 - protein, 11 aa, Borrelia burgdorferi
ILKSGEITVAL

SEQ ID NO: 51347 - protein, 11 aa, Borrelia burgdorferi
VSKEKDKDGKY

SEQ ID NO: 51348 - protein, 11 aa, Borrelia burgdorferi
VLKDFTLEGTL

SEQ ID NO: 51349 - protein, 11 aa, Borrelia burgdorferi
TLKVTEGTVVL

SEQ ID NO: 51350 - protein, 11 aa, Borrelia burgdorferi
VNSQKTKNLVF

SEQ ID NO: 51351 - protein, 9 aa, Borrelia burgdorferi
KKYLLGIGL

SEQ ID NO: 51352 - protein, 10 aa, Borrelia burgdorferi
VRANGTRLEY

SEQ ID NO: 51353 - protein, 10 aa, Borrelia burgdorferi
GKWDSKTSTL

SEQ ID NO: 51354 - protein, 11 aa, Borrelia burgdorferi
KKYLLGIGLIL

SEQ ID NO: 51355 - protein, 9 aa, Borrelia burgdorferi
LAADGKTTL

SEQ ID NO: 51356 - protein, 9 aa, Borrelia burgdorferi
RANGTRLEY

SEQ ID NO: 51357 - protein, 9 aa, Borrelia burgdorferi
FTLEGTLAA

SEQ ID NO: 51358 - protein, 9 aa, Borrelia burgdorferi
TVVLSKNIL

SEQ ID NO: 51359 - protein, 9 aa, Borrelia burgdorferi
VALDDSDTT

SEQ ID NO: 51360 - protein, 9 aa, Borrelia burgdorferi
YLLGIGLIL

SEQ ID NO: 51361 - protein, 9 aa, Borrelia burgdorferi
LPGGMTELV

SEQ ID NO: 51362 - protein, 10 aa, Borrelia burgdorferi
IADDLSQTKF

SEQ ID NO: 51363 - protein, 10 aa, Borrelia burgdorferi
LPGGMTELVS

SEQ ID NO: 51364 - protein, 10 aa, Borrelia burgdorferi
LKVTEGTVVL

SEQ ID NO: 51365 - protein, 10 aa, Borrelia burgdorferi
YSLEATVDKL

SEQ ID NO: 51366 - protein, 11 aa, Borrelia burgdorferi
YLLGIGLILAL

SEQ ID NO: 51367 - protein, 11 aa, Borrelia burgdorferi
NSVSVDLPGGM

SEQ ID NO: 51368 - protein, 11 aa, Borrelia burgdorferi
IVRANGTRLEY

SEQ ID NO: 51369 - protein, 11 aa, Borrelia burgdorferi
TIADDLSQTKF

SEQ ID NO: 51370 - protein, 11 aa, Borrelia burgdorferi
KAVEITTLKEL

SEQ ID NO: 51371 - protein, 9 aa, Borrelia burgdorferi
KEVLKDFTL

SEQ ID NO: 51372 - protein, 9 aa, Borrelia burgdorferi
GEITVALDD

SEQ ID NO: 51373 - protein, 9 aa, Borrelia burgdorferi
KEKDKDGKY

SEQ ID NO: 51374 - protein, 9 aa, Borrelia burgdorferi
KEDAKTLVS

SEQ ID NO: 51375 - protein, 10 aa, Borrelia burgdorferi
GEITVALDDS

SEQ ID NO: 51376 - protein, 10 aa, Borrelia burgdorferi
KEDTITVQKY

SEQ ID NO: 51377 - protein, 11 aa, Borrelia burgdorferi
GEITVALDDSD

SEQ ID NO: 51378 - protein, 11 aa, Borrelia burgdorferi
KEVLKDFTLEG

SEQ ID NO: 51379 - protein, 9 aa, Borrelia burgdorferi
LPGGMTELV

SEQ ID NO: 51380 - protein, 11 aa, Borrelia burgdorferi
TTQATKKTGKW

SEQ ID NO: 51381 - protein, 11 aa, Borrelia garinii
NQDEAIAVNIY

SEQ ID NO: 51382 - protein, 11 aa, Borrelia garinii
ELAVQSGNGTY

SEQ ID NO: 51383 - protein, 9 aa, Borrelia garinii
SQASWTLRV

SEQ ID NO: 51384 - protein, 9 aa, Borrelia garinii
QLTDEINRI

SEQ ID NO: 51385 - protein, 9 aa, Borrelia garinii
AQAAQTAPV

SEQ ID NO: 51386 - protein, 9 aa, Borrelia garinii
AIAVNIYAA

SEQ ID NO: 51387 - protein, 9 aa, Borrelia garinii
SLAKIENAI

SEQ ID NO: 51388 - protein, 9 aa, Borrelia garinii
AVNIYAANV

SEQ ID NO: 51389 - protein, 9 aa, Borrelia garinii
AQYNQMHML

SEQ ID NO: 51390 - protein, 9 aa, Borrelia garinii
TTVDANTSL

SEQ ID NO: 51391 - protein, 9 aa, Borrelia garinii
SQGGVNSPV

SEQ ID NO: 51392 - protein, 9 aa, Borrelia garinii
QTAPVQEGV

SEQ ID NO: 51393 - protein, 10 aa, Borrelia garinii
NIYAANVANL

SEQ ID NO: 51394 - protein, 10 aa, Borrelia garinii
NLNEVEKVLV

SEQ ID NO: 51395 - protein, 10 aa, Borrelia garinii
VLVRMKELAV

SEQ ID NO: 51396 - protein, 10 aa, Borrelia garinii
QLTDEINRIA

SEQ ID NO: 51397 - protein, 10 aa, Borrelia garinii
NLFSGEGAQA

SEQ ID NO: 51398 - protein, 10 aa, Borrelia garinii
IAVNIYAANV

SEQ ID NO: 51399 - protein, 11 aa, Borrelia garinii
SLSGSQASWTL

SEQ ID NO: 51400 - protein, 11 aa, Borrelia garinii
MLSNKSASQNV

SEQ ID NO: 51401 - protein, 11 aa, Borrelia garinii
AIAVNIYAANV

SEQ ID NO: 51402 - protein, 11 aa, Borrelia garinii
SQASWTLRVHV

SEQ ID NO: 51403 - protein, 11 aa, Borrelia garinii
GMQPAKINTPA

SEQ ID NO: 51404 - protein, 11 aa, Borrelia garinii
KVLVRMKELAV

SEQ ID NO: 51405 - protein, 11 aa, Borrelia garinii
SLAKIENAIRM

SEQ ID NO: 51406 - protein, 11 aa, Borrelia garinii
NLFSGEGAQAA

SEQ ID NO: 51407 - protein, 9 aa, Borrelia garinii
NQMHMLSNK

SEQ ID NO: 51408 - protein, 9 aa, Borrelia garinii
GSQASWTLR

SEQ ID NO: 51409 - protein, 10 aa, Borrelia garinii
TVDANTSLAK

SEQ ID NO: 51410 - protein, 10 aa, Borrelia garinii
YNQMHMLSNK

SEQ ID NO: 51411 - protein, 11 aa, Borrelia garinii
LSGSQASWTLR

SEQ ID NO: 51412 - protein, 11 aa, Borrelia garinii
TTVDANTSLAK

SEQ ID NO: 51413 - protein, 11 aa, Borrelia garinii
LSNKSASQNVR

SEQ ID NO: 51414 - protein, 9 aa, Borrelia garinii
NQMHMLSNK

SEQ ID NO: 51415 - protein, 9 aa, Borrelia garinii
GSQASWTLR

SEQ ID NO: 51416 - protein, 9 aa, Borrelia garinii
AVQSGNGTY

SEQ ID NO: 51417 - protein, 10 aa, Borrelia garinii
TVDANTSLAK

SEQ ID NO: 51418 - protein, 10 aa, Borrelia garinii
YNQMHMLSNK

SEQ ID NO: 51419 - protein, 10 aa, Borrelia garinii
EVEKVLVRMK

SEQ ID NO: 51420 - protein, 11 aa, Borrelia garinii
TTVDANTSLAK

SEQ ID NO: 51421 - protein, 11 aa, Borrelia garinii
TTEGNLNEVEK

SEQ ID NO: 51422 - protein, 11 aa, Borrelia garinii
TAEELGMQPAK

SEQ ID NO: 51423 - protein, 11 aa, Borrelia garinii
TSLAKIENAIR

SEQ ID NO: 51424 - protein, 11 aa, Borrelia garinii
QYNQMHMLSNK

SEQ ID NO: 51425 - protein, 11 aa, Borrelia garinii
LSGSQASWTLR

SEQ ID NO: 51426 - protein, 11 aa, Borrelia garinii
LSNKSASQNVR

SEQ ID NO: 51427 - protein, 9 aa, Borrelia garinii
IYAANVANL

SEQ ID NO: 51428 - protein, 9 aa, Borrelia garinii
YAANVANLF

SEQ ID NO: 51429 - protein, 10 aa, Borrelia garinii
IYAANVANLF

SEQ ID NO: 51430 - protein, 10 aa, Borrelia garinii
TYSDADRGSI

SEQ ID NO: 51431 - protein, 11 aa, Borrelia garinii
IYAANVANLFS

SEQ ID NO: 51432 - protein, 9 aa, Borrelia garinii
AVQSGNGTY

SEQ ID NO: 51433 - protein, 9 aa, Borrelia garinii
YAANVANLF

SEQ ID NO: 51434 - protein, 11 aa, Borrelia garinii
ELAVQSGNGTY

SEQ ID NO: 51435 - protein, 11 aa, Borrelia garinii
EINRIADQAQY

SEQ ID NO: 51436 - protein, 9 aa, Borrelia garinii
LAKIENAIR

SEQ ID NO: 51437 - protein, 9 aa, Borrelia garinii
EGNLNEVEK

SEQ ID NO: 51438 - protein, 9 aa, Borrelia garinii
YAANVANLF

SEQ ID NO: 51439 - protein, 9 aa, Borrelia garinii
NGTYSDADR

SEQ ID NO: 51440 - protein, 9 aa, Borrelia garinii
GSQASWTLR

SEQ ID NO: 51441 - protein, 9 aa, Borrelia garinii
NQMHMLSNK

SEQ ID NO: 51442 - protein, 9 aa, Borrelia garinii
TSKAINFIQ

SEQ ID NO: 51443 - protein, 9 aa, Borrelia garinii
NKSASQNVR

SEQ ID NO: 51444 - protein, 10 aa, Borrelia garinii
EVEKVLVRMK

SEQ ID NO: 51445 - protein, 10 aa, Borrelia garinii
SLAKIENAIR

SEQ ID NO: 51446 - protein, 10 aa, Borrelia garinii
TVDANTSLAK

SEQ ID NO: 51447 - protein, 10 aa, Borrelia garinii
NTSKAINFIQ

SEQ ID NO: 51448 - protein, 10 aa, Borrelia garinii
SGSQASWTLR

SEQ ID NO: 51449 - protein, 10 aa, Borrelia garinii
TTVDANTSLA

SEQ ID NO: 51450 - protein, 11 aa, Borrelia garinii
TTVDANTSLAK

SEQ ID NO: 51451 - protein, 11 aa, Borrelia garinii
TTEGNLNEVEK

SEQ ID NO: 51452 - protein, 11 aa, Borrelia garinii
EIEQLTDEINR

SEQ ID NO: 51453 - protein, 11 aa, Borrelia garinii
LSNKSASQNVR

SEQ ID NO: 51454 - protein, 11 aa, Borrelia garinii
TSLAKIENAIR

SEQ ID NO: 51455 - protein, 11 aa, Borrelia garinii
EINRIADQAQY

SEQ ID NO: 51456 - protein, 11 aa, Borrelia garinii
NLNEVEKVLVR

SEQ ID NO: 51457 - protein, 11 aa, Borrelia garinii
LSGSQASWTLR

SEQ ID NO: 51458 - protein, 11 aa, Borrelia garinii
TAEELGMQPAK

SEQ ID NO: 51459 - protein, 11 aa, Borrelia garinii
QYNQMHMLSNK

SEQ ID NO: 51460 - protein, 11 aa, Borrelia garinii
NIYAANVANLF

SEQ ID NO: 51461 - protein, 11 aa, Borrelia garinii
QTAPVQEGVQQ

SEQ ID NO: 51462 - protein, 9 aa, Borrelia garinii
SPVNVTTTV

SEQ ID NO: 51463 - protein, 9 aa, Borrelia garinii
QPAKINTPA

SEQ ID NO: 51464 - protein, 9 aa, Borrelia garinii
QPAPATAPS

SEQ ID NO: 51465 - protein, 9 aa, Borrelia garinii
LVRMKELAV

SEQ ID NO: 51466 - protein, 9 aa, Borrelia garinii
TPASLSGSQ

SEQ ID NO: 51467 - protein, 9 aa, Borrelia garinii
APSQGGVNS

SEQ ID NO: 51468 - protein, 9 aa, Borrelia garinii
APATAPSQG

SEQ ID NO: 51469 - protein, 9 aa, Borrelia garinii
APVQEGVQQ

SEQ ID NO: 51470 - protein, 10 aa, Borrelia garinii
TPASLSGSQA

SEQ ID NO: 51471 - protein, 10 aa, Borrelia garinii
SPVNVTTTVD

SEQ ID NO: 51472 - protein, 10 aa, Borrelia garinii
APSQGGVNSP

SEQ ID NO: 51473 - protein, 10 aa, Borrelia garinii
QPAKINTPAS

SEQ ID NO: 51474 - protein, 11 aa, Borrelia garinii
APSQGGVNSPV

SEQ ID NO: 51475 - protein, 11 aa, Borrelia garinii
QPAKINTPASL

SEQ ID NO: 51476 - protein, 11 aa, Borrelia garinii
APATAPSQGGV

SEQ ID NO: 51477 - protein, 11 aa, Borrelia garinii
SPVNVTTTVDA

SEQ ID NO: 51478 - protein, 11 aa, Borrelia garinii
TPASLSGSQAS

SEQ ID NO: 51479 - protein, 9 aa, Borrelia garinii
KVLVRMKEL

SEQ ID NO: 51480 - protein, 11 aa, Borrelia garinii
VEKVLVRMKEL

SEQ ID NO: 51481 - protein, 9 aa, Borrelia garinii
YAANVANLF

SEQ ID NO: 51482 - protein, 9 aa, Borrelia garinii
AVQSGNGTY

SEQ ID NO: 51483 - protein, 9 aa, Borrelia garinii
AQAAQTAPV

SEQ ID NO: 51484 - protein, 9 aa, Borrelia garinii
AQYNQMHML

SEQ ID NO: 51485 - protein, 9 aa, Borrelia garinii
SQGGVNSPV

SEQ ID NO: 51486 - protein, 9 aa, Borrelia garinii
SLSGSQASW

SEQ ID NO: 51487 - protein, 9 aa, Borrelia garinii
SQASWTLRV

SEQ ID NO: 51488 - protein, 9 aa, Borrelia garinii
IQIEIEQLT

SEQ ID NO: 51489 - protein, 10 aa, Borrelia garinii
LAVQSGNGTY

SEQ ID NO: 51490 - protein, 10 aa, Borrelia garinii
SQASWTLRVH

SEQ ID NO: 51491 - protein, 10 aa, Borrelia garinii
SQNVRTAEEL

SEQ ID NO: 51492 - protein, 10 aa, Borrelia garinii
VQQEGAQQPA

SEQ ID NO: 51493 - protein, 10 aa, Borrelia garinii
INRIADQAQY

SEQ ID NO: 51494 - protein, 10 aa, Borrelia garinii
AQAAQTAPVQ

SEQ ID NO: 51495 - protein, 10 aa, Borrelia garinii
MQPAKINTPA

SEQ ID NO: 51496 - protein, 11 aa, Borrelia garinii
ELAVQSGNGTY

SEQ ID NO: 51497 - protein, 11 aa, Borrelia garinii
NIYAANVANLF

SEQ ID NO: 51498 - protein, 11 aa, Borrelia garinii
NQDEAIAVNIY

SEQ ID NO: 51499 - protein, 11 aa, Borrelia garinii
SLSGSQASWTL

SEQ ID NO: 51500 - protein, 9 aa, Borrelia garinii
NRIADQAQY

SEQ ID NO: 51501 - protein, 9 aa, Borrelia garinii
YAANVANLF

SEQ ID NO: 51502 - protein, 9 aa, Borrelia garinii
QPAPATAPS

SEQ ID NO: 51503 - protein, 9 aa, Borrelia garinii
SPVNVTTTV

SEQ ID NO: 51504 - protein, 9 aa, Borrelia garinii
DEAIAVNIY

SEQ ID NO: 51505 - protein, 9 aa, Borrelia garinii
TTVDANTSL

SEQ ID NO: 51506 - protein, 9 aa, Borrelia garinii
LAVQSGNGT

SEQ ID NO: 51507 - protein, 9 aa, Borrelia garinii
QPAKINTPA

SEQ ID NO: 51508 - protein, 9 aa, Borrelia garinii
AVQSGNGTY

SEQ ID NO: 51509 - protein, 9 aa, Borrelia garinii
QASWTLRVH

SEQ ID NO: 51510 - protein, 9 aa, Borrelia garinii
IAVNIYAAN

SEQ ID NO: 51511 - protein, 10 aa, Borrelia garinii
LAVQSGNGTY

SEQ ID NO: 51512 - protein, 10 aa, Borrelia garinii
IADQAQYNQM

SEQ ID NO: 51513 - protein, 10 aa, Borrelia garinii
QPAKINTPAS

SEQ ID NO: 51514 - protein, 10 aa, Borrelia garinii
LAKIENAIRM

SEQ ID NO: 51515 - protein, 10 aa, Borrelia garinii
QPAPATAPSQ

SEQ ID NO: 51516 - protein, 10 aa, Borrelia garinii
YAANVANLFS

SEQ ID NO: 51517 - protein, 10 aa, Borrelia garinii
TAEELGMQPA

SEQ ID NO: 51518 - protein, 10 aa, Borrelia garinii
EAIAVNIYAA

SEQ ID NO: 51519 - protein, 10 aa, Borrelia garinii
QAQYNQMHML

SEQ ID NO: 51520 - protein, 10 aa, Borrelia garinii
TPASLSGSQA

SEQ ID NO: 51521 - protein, 10 aa, Borrelia garinii
SPVNVTTTVD

SEQ ID NO: 51522 - protein, 11 aa, Borrelia garinii
TPASLSGSQAS

SEQ ID NO: 51523 - protein, 11 aa, Borrelia garinii
ELAVQSGNGTY

SEQ ID NO: 51524 - protein, 11 aa, Borrelia garinii
NQDEAIAVNIY

SEQ ID NO: 51525 - protein, 11 aa, Borrelia garinii
QPAKINTPASL

SEQ ID NO: 51526 - protein, 11 aa, Borrelia garinii
IAVNIYAANVA

SEQ ID NO: 51527 - protein, 11 aa, Borrelia garinii
NIYAANVANLF

SEQ ID NO: 51528 - protein, 11 aa, Borrelia garinii
SPVNVTTTVDA

SEQ ID NO: 51529 - protein, 11 aa, Borrelia garinii
EINRIADQAQY

SEQ ID NO: 51530 - protein, 11 aa, Borrelia garinii
IADQAQYNQMH

SEQ ID NO: 51531 - protein, 11 aa, Borrelia garinii
APSQGGVNSPV

SEQ ID NO: 51532 - protein, 11 aa, Borrelia garinii
LAVQSGNGTYS

SEQ ID NO: 51533 - protein, 10 aa, Borrelia garinii
EELGMQPAKI

SEQ ID NO: 51534 - protein, 10 aa, Borrelia garinii
NEVEKVLVRM

SEQ ID NO: 51535 - protein, 10 aa, Borrelia garinii
DEINRIADQA

SEQ ID NO: 51536 - protein, 11 aa, Borrelia garinii
DEINRIADQAQ

SEQ ID NO: 51537 - protein, 9 aa, Borrelia garinii
SPVNVTTTV

SEQ ID NO: 51538 - protein, 11 aa, Borrelia garinii
APATAPSQGGV

SEQ ID NO: 51539 - protein, 11 aa, Borrelia garinii
APSQGGVNSPV

SEQ ID NO: 51540 - protein, 10 aa, Borrelia garinii
ASLSGSQASW

SEQ ID NO: 51541 - protein, 8 aa, Mycobacterium tuberculosis
MAEMKTDA

SEQ ID NO: 51542 - protein, 8 aa, Mycobacterium tuberculosis
AEMKTDAA

SEQ ID NO: 51543 - protein, 8 aa, Mycobacterium tuberculosis
EMKTDAAT

SEQ ID NO: 51544 - protein, 8 aa, Mycobacterium tuberculosis
MKTDAATL

SEQ ID NO: 51545 - protein, 8 aa, Mycobacterium tuberculosis
KTDAATLA

SEQ ID NO: 51546 - protein, 8 aa, Mycobacterium tuberculosis
TDAATLAQ

SEQ ID NO: 51547 - protein, 8 aa, Mycobacterium tuberculosis
DAATLAQE

SEQ ID NO: 51548 - protein, 8 aa, Mycobacterium tuberculosis
AATLAQEA

SEQ ID NO: 51549 - protein, 8 aa, Mycobacterium tuberculosis
ATLAQEAG

SEQ ID NO: 51550 - protein, 8 aa, Mycobacterium tuberculosis
TLAQEAGN

SEQ ID NO: 51551 - protein, 8 aa, Mycobacterium tuberculosis
LAQEAGNF

SEQ ID NO: 51552 - protein, 8 aa, Mycobacterium tuberculosis
AQEAGNFE

SEQ ID NO: 51553 - protein, 8 aa, Mycobacterium tuberculosis
QEAGNFER

SEQ ID NO: 51554 - protein, 8 aa, Mycobacterium tuberculosis
EAGNFERI

SEQ ID NO: 51555 - protein, 8 aa, Mycobacterium tuberculosis
AGNFERIS

SEQ ID NO: 51556 - protein, 8 aa, Mycobacterium tuberculosis
GNFERISG

SEQ ID NO: 51557 - protein, 8 aa, Mycobacterium tuberculosis
NFERISGD

SEQ ID NO: 51558 - protein, 8 aa, Mycobacterium tuberculosis
FERISGDL

SEQ ID NO: 51559 - protein, 8 aa, Mycobacterium tuberculosis
ERISGDLK

SEQ ID NO: 51560 - protein, 8 aa, Mycobacterium tuberculosis
RISGDLKT

SEQ ID NO: 51561 - protein, 8 aa, Mycobacterium tuberculosis
ISGDLKTQ

SEQ ID NO: 51562 - protein, 8 aa, Mycobacterium tuberculosis
SGDLKTQI

SEQ ID NO: 51563 - protein, 8 aa, Mycobacterium tuberculosis
GDLKTQID

SEQ ID NO: 51564 - protein, 8 aa, Mycobacterium tuberculosis
DLKTQIDQ

SEQ ID NO: 51565 - protein, 8 aa, Mycobacterium tuberculosis
LKTQIDQV

SEQ ID NO: 51566 - protein, 8 aa, Mycobacterium tuberculosis
KTQIDQVE

SEQ ID NO: 51567 - protein, 8 aa, Mycobacterium tuberculosis
TQIDQVES

SEQ ID NO: 51568 - protein, 8 aa, Mycobacterium tuberculosis
QIDQVEST

SEQ ID NO: 51569 - protein, 8 aa, Mycobacterium tuberculosis
IDQVESTA

SEQ ID NO: 51570 - protein, 8 aa, Mycobacterium tuberculosis
DQVESTAG

SEQ ID NO: 51571 - protein, 8 aa, Mycobacterium tuberculosis
QVESTAGS

SEQ ID NO: 51572 - protein, 8 aa, Mycobacterium tuberculosis
VESTAGSL

SEQ ID NO: 51573 - protein, 8 aa, Mycobacterium tuberculosis
ESTAGSLQ

SEQ ID NO: 51574 - protein, 8 aa, Mycobacterium tuberculosis
STAGSLQG

SEQ ID NO: 51575 - protein, 8 aa, Mycobacterium tuberculosis
TAGSLQGQ

SEQ ID NO: 51576 - protein, 8 aa, Mycobacterium tuberculosis
AGSLQGQW

SEQ ID NO: 51577 - protein, 8 aa, Mycobacterium tuberculosis
GSLQGQWR

SEQ ID NO: 51578 - protein, 8 aa, Mycobacterium tuberculosis
SLQGQWRG

SEQ ID NO: 51579 - protein, 8 aa, Mycobacterium tuberculosis
LQGQWRGA

SEQ ID NO: 51580 - protein, 8 aa, Mycobacterium tuberculosis
QGQWRGAA

SEQ ID NO: 51581 - protein, 8 aa, Mycobacterium tuberculosis
GQWRGAAG

SEQ ID NO: 51582 - protein, 8 aa, Mycobacterium tuberculosis
QWRGAAGT

SEQ ID NO: 51583 - protein, 8 aa, Mycobacterium tuberculosis
WRGAAGTA

SEQ ID NO: 51584 - protein, 8 aa, Mycobacterium tuberculosis
RGAAGTAA

SEQ ID NO: 51585 - protein, 8 aa, Mycobacterium tuberculosis
GAAGTAAQ

SEQ ID NO: 51586 - protein, 8 aa, Mycobacterium tuberculosis
AAGTAAQA

SEQ ID NO: 51587 - protein, 8 aa, Mycobacterium tuberculosis
AGTAAQAA

SEQ ID NO: 51588 - protein, 8 aa, Mycobacterium tuberculosis
GTAAQAAV

SEQ ID NO: 51589 - protein, 8 aa, Mycobacterium tuberculosis
TAAQAAVV

SEQ ID NO: 51590 - protein, 8 aa, Mycobacterium tuberculosis
AAQAAVVR

SEQ ID NO: 51591 - protein, 8 aa, Mycobacterium tuberculosis
AQAAVVRF

SEQ ID NO: 51592 - protein, 8 aa, Mycobacterium tuberculosis
QAAVVRFQ

SEQ ID NO: 51593 - protein, 8 aa, Mycobacterium tuberculosis
AAVVRFQE

SEQ ID NO: 51594 - protein, 8 aa, Mycobacterium tuberculosis
AVVRFQEA

SEQ ID NO: 51595 - protein, 8 aa, Mycobacterium tuberculosis
VVRFQEAA

SEQ ID NO: 51596 - protein, 8 aa, Mycobacterium tuberculosis
VRFQEAAN

SEQ ID NO: 51597 - protein, 8 aa, Mycobacterium tuberculosis
RFQEAANK

SEQ ID NO: 51598 - protein, 8 aa, Mycobacterium tuberculosis
FQEAANKQ

SEQ ID NO: 51599 - protein, 8 aa, Mycobacterium tuberculosis
QEAANKQK

SEQ ID NO: 51600 - protein, 8 aa, Mycobacterium tuberculosis
EAANKQKQ

SEQ ID NO: 51601 - protein, 8 aa, Mycobacterium tuberculosis
AANKQKQE

SEQ ID NO: 51602 - protein, 8 aa, Mycobacterium tuberculosis
ANKQKQEL

SEQ ID NO: 51603 - protein, 8 aa, Mycobacterium tuberculosis
NKQKQELD

SEQ ID NO: 51604 - protein, 8 aa, Mycobacterium tuberculosis
KQKQELDE

SEQ ID NO: 51605 - protein, 8 aa, Mycobacterium tuberculosis
QKQELDEI

SEQ ID NO: 51606 - protein, 8 aa, Mycobacterium tuberculosis
KQELDEIS

SEQ ID NO: 51607 - protein, 8 aa, Mycobacterium tuberculosis
QELDEIST

SEQ ID NO: 51608 - protein, 8 aa, Mycobacterium tuberculosis
ELDEISTN

SEQ ID NO: 51609 - protein, 8 aa, Mycobacterium tuberculosis
LDEISTNI

SEQ ID NO: 51610 - protein, 8 aa, Mycobacterium tuberculosis
DEISTNIR

SEQ ID NO: 51611 - protein, 8 aa, Mycobacterium tuberculosis
EISTNIRQ

SEQ ID NO: 51612 - protein, 8 aa, Mycobacterium tuberculosis
ISTNIRQA

SEQ ID NO: 51613 - protein, 8 aa, Mycobacterium tuberculosis
STNIRQAG

SEQ ID NO: 51614 - protein, 8 aa, Mycobacterium tuberculosis
TNIRQAGV

SEQ ID NO: 51615 - protein, 8 aa, Mycobacterium tuberculosis
NIRQAGVQ

SEQ ID NO: 51616 - protein, 8 aa, Mycobacterium tuberculosis
IRQAGVQY

SEQ ID NO: 51617 - protein, 8 aa, Mycobacterium tuberculosis
RQAGVQYS

SEQ ID NO: 51618 - protein, 8 aa, Mycobacterium tuberculosis
QAGVQYSR

SEQ ID NO: 51619 - protein, 8 aa, Mycobacterium tuberculosis
AGVQYSRA

SEQ ID NO: 51620 - protein, 8 aa, Mycobacterium tuberculosis
GVQYSRAD

SEQ ID NO: 51621 - protein, 8 aa, Mycobacterium tuberculosis
VQYSRADE

SEQ ID NO: 51622 - protein, 8 aa, Mycobacterium tuberculosis
QYSRADEE

SEQ ID NO: 51623 - protein, 8 aa, Mycobacterium tuberculosis
YSRADEEQ

SEQ ID NO: 51624 - protein, 8 aa, Mycobacterium tuberculosis
SRADEEQQ

SEQ ID NO: 51625 - protein, 8 aa, Mycobacterium tuberculosis
RADEEQQQ

SEQ ID NO: 51626 - protein, 8 aa, Mycobacterium tuberculosis
ADEEQQQA

SEQ ID NO: 51627 - protein, 8 aa, Mycobacterium tuberculosis
DEEQQQAL

SEQ ID NO: 51628 - protein, 8 aa, Mycobacterium tuberculosis
EEQQQALS

SEQ ID NO: 51629 - protein, 8 aa, Mycobacterium tuberculosis
EQQQALSS

SEQ ID NO: 51630 - protein, 8 aa, Mycobacterium tuberculosis
QQQALSSQ

SEQ ID NO: 51631 - protein, 8 aa, Mycobacterium tuberculosis
QQALSSQM

SEQ ID NO: 51632 - protein, 8 aa, Mycobacterium tuberculosis
QALSSQMG

SEQ ID NO: 51633 - protein, 8 aa, Mycobacterium tuberculosis
ALSSQMGF

SEQ ID NO: 51634 - protein, 9 aa, Mycobacterium tuberculosis
MAEMKTDAA

SEQ ID NO: 51635 - protein, 9 aa, Mycobacterium tuberculosis
AEMKTDAAT

SEQ ID NO: 51636 - protein, 9 aa, Mycobacterium tuberculosis
EMKTDAATL

SEQ ID NO: 51637 - protein, 9 aa, Mycobacterium tuberculosis
MKTDAATLA

SEQ ID NO: 51638 - protein, 9 aa, Mycobacterium tuberculosis
KTDAATLAQ

SEQ ID NO: 51639 - protein, 9 aa, Mycobacterium tuberculosis
TDAATLAQE

SEQ ID NO: 51640 - protein, 9 aa, Mycobacterium tuberculosis
DAATLAQEA

SEQ ID NO: 51641 - protein, 9 aa, Mycobacterium tuberculosis
AATLAQEAG

SEQ ID NO: 51642 - protein, 9 aa, Mycobacterium tuberculosis
ATLAQEAGN

SEQ ID NO: 51643 - protein, 9 aa, Mycobacterium tuberculosis
TLAQEAGNF

SEQ ID NO: 51644 - protein, 9 aa, Mycobacterium tuberculosis
LAQEAGNFE

SEQ ID NO: 51645 - protein, 9 aa, Mycobacterium tuberculosis
AQEAGNFER

SEQ ID NO: 51646 - protein, 9 aa, Mycobacterium tuberculosis
QEAGNFERI

SEQ ID NO: 51647 - protein, 9 aa, Mycobacterium tuberculosis
EAGNFERIS

SEQ ID NO: 51648 - protein, 9 aa, Mycobacterium tuberculosis
AGNFERISG

SEQ ID NO: 51649 - protein, 9 aa, Mycobacterium tuberculosis
GNFERISGD

SEQ ID NO: 51650 - protein, 9 aa, Mycobacterium tuberculosis
NFERISGDL

SEQ ID NO: 51651 - protein, 9 aa, Mycobacterium tuberculosis
FERISGDLK

SEQ ID NO: 51652 - protein, 9 aa, Mycobacterium tuberculosis
ERISGDLKT

SEQ ID NO: 51653 - protein, 9 aa, Mycobacterium tuberculosis
RISGDLKTQ

SEQ ID NO: 51654 - protein, 9 aa, Mycobacterium tuberculosis
ISGDLKTQI

SEQ ID NO: 51655 - protein, 9 aa, Mycobacterium tuberculosis
SGDLKTQID

SEQ ID NO: 51656 - protein, 9 aa, Mycobacterium tuberculosis
GDLKTQIDQ

SEQ ID NO: 51657 - protein, 9 aa, Mycobacterium tuberculosis
DLKTQIDQV

SEQ ID NO: 51658 - protein, 9 aa, Mycobacterium tuberculosis
LKTQIDQVE

SEQ ID NO: 51659 - protein, 9 aa, Mycobacterium tuberculosis
KTQIDQVES

SEQ ID NO: 51660 - protein, 9 aa, Mycobacterium tuberculosis
TQIDQVEST

SEQ ID NO: 51661 - protein, 9 aa, Mycobacterium tuberculosis
QIDQVESTA

SEQ ID NO: 51662 - protein, 9 aa, Mycobacterium tuberculosis
IDQVESTAG

SEQ ID NO: 51663 - protein, 9 aa, Mycobacterium tuberculosis
DQVESTAGS

SEQ ID NO: 51664 - protein, 9 aa, Mycobacterium tuberculosis
QVESTAGSL

SEQ ID NO: 51665 - protein, 9 aa, Mycobacterium tuberculosis
VESTAGSLQ

SEQ ID NO: 51666 - protein, 9 aa, Mycobacterium tuberculosis
ESTAGSLQG

SEQ ID NO: 51667 - protein, 9 aa, Mycobacterium tuberculosis
STAGSLQGQ

SEQ ID NO: 51668 - protein, 9 aa, Mycobacterium tuberculosis
TAGSLQGQW

SEQ ID NO: 51669 - protein, 9 aa, Mycobacterium tuberculosis
AGSLQGQWR

SEQ ID NO: 51670 - protein, 9 aa, Mycobacterium tuberculosis
GSLQGQWRG

SEQ ID NO: 51671 - protein, 9 aa, Mycobacterium tuberculosis
SLQGQWRGA

SEQ ID NO: 51672 - protein, 9 aa, Mycobacterium tuberculosis
LQGQWRGAA

SEQ ID NO: 51673 - protein, 9 aa, Mycobacterium tuberculosis
QGQWRGAAG

SEQ ID NO: 51674 - protein, 9 aa, Mycobacterium tuberculosis
GQWRGAAGT

SEQ ID NO: 51675 - protein, 9 aa, Mycobacterium tuberculosis
QWRGAAGTA

SEQ ID NO: 51676 - protein, 9 aa, Mycobacterium tuberculosis
WRGAAGTAA

SEQ ID NO: 51677 - protein, 9 aa, Mycobacterium tuberculosis
RGAAGTAAQ

SEQ ID NO: 51678 - protein, 9 aa, Mycobacterium tuberculosis
GAAGTAAQA

SEQ ID NO: 51679 - protein, 9 aa, Mycobacterium tuberculosis
AAGTAAQAA

SEQ ID NO: 51680 - protein, 9 aa, Mycobacterium tuberculosis
AGTAAQAAV

SEQ ID NO: 51681 - protein, 9 aa, Mycobacterium tuberculosis
GTAAQAAVV

SEQ ID NO: 51682 - protein, 9 aa, Mycobacterium tuberculosis
TAAQAAVVR

SEQ ID NO: 51683 - protein, 9 aa, Mycobacterium tuberculosis
AAQAAVVRF

SEQ ID NO: 51684 - protein, 9 aa, Mycobacterium tuberculosis
AQAAVVRFQ

SEQ ID NO: 51685 - protein, 9 aa, Mycobacterium tuberculosis
QAAVVRFQE

SEQ ID NO: 51686 - protein, 9 aa, Mycobacterium tuberculosis
AAVVRFQEA

SEQ ID NO: 51687 - protein, 9 aa, Mycobacterium tuberculosis
AVVRFQEAA

SEQ ID NO: 51688 - protein, 9 aa, Mycobacterium tuberculosis
VVRFQEAAN

SEQ ID NO: 51689 - protein, 9 aa, Mycobacterium tuberculosis
VRFQEAANK

SEQ ID NO: 51690 - protein, 9 aa, Mycobacterium tuberculosis
RFQEAANKQ

SEQ ID NO: 51691 - protein, 9 aa, Mycobacterium tuberculosis
FQEAANKQK

SEQ ID NO: 51692 - protein, 9 aa, Mycobacterium tuberculosis
QEAANKQKQ

SEQ ID NO: 51693 - protein, 9 aa, Mycobacterium tuberculosis
EAANKQKQE

SEQ ID NO: 51694 - protein, 9 aa, Mycobacterium tuberculosis
AANKQKQEL

SEQ ID NO: 51695 - protein, 9 aa, Mycobacterium tuberculosis
ANKQKQELD

SEQ ID NO: 51696 - protein, 9 aa, Mycobacterium tuberculosis
NKQKQELDE

SEQ ID NO: 51697 - protein, 9 aa, Mycobacterium tuberculosis
KQKQELDEI

SEQ ID NO: 51698 - protein, 9 aa, Mycobacterium tuberculosis
QKQELDEIS

SEQ ID NO: 51699 - protein, 9 aa, Mycobacterium tuberculosis
KQELDEIST

SEQ ID NO: 51700 - protein, 9 aa, Mycobacterium tuberculosis
QELDEISTN

SEQ ID NO: 51701 - protein, 9 aa, Mycobacterium tuberculosis
ELDEISTNI

SEQ ID NO: 51702 - protein, 9 aa, Mycobacterium tuberculosis
LDEISTNIR

SEQ ID NO: 51703 - protein, 9 aa, Mycobacterium tuberculosis
DEISTNIRQ

SEQ ID NO: 51704 - protein, 9 aa, Mycobacterium tuberculosis
EISTNIRQA

SEQ ID NO: 51705 - protein, 9 aa, Mycobacterium tuberculosis
ISTNIRQAG

SEQ ID NO: 51706 - protein, 9 aa, Mycobacterium tuberculosis
STNIRQAGV

SEQ ID NO: 51707 - protein, 9 aa, Mycobacterium tuberculosis
TNIRQAGVQ

SEQ ID NO: 51708 - protein, 9 aa, Mycobacterium tuberculosis
NIRQAGVQY

SEQ ID NO: 51709 - protein, 9 aa, Mycobacterium tuberculosis
IRQAGVQYS

SEQ ID NO: 51710 - protein, 9 aa, Mycobacterium tuberculosis
RQAGVQYSR

SEQ ID NO: 51711 - protein, 9 aa, Mycobacterium tuberculosis
QAGVQYSRA

SEQ ID NO: 51712 - protein, 9 aa, Mycobacterium tuberculosis
AGVQYSRAD

SEQ ID NO: 51713 - protein, 9 aa, Mycobacterium tuberculosis
GVQYSRADE

SEQ ID NO: 51714 - protein, 9 aa, Mycobacterium tuberculosis
VQYSRADEE

SEQ ID NO: 51715 - protein, 9 aa, Mycobacterium tuberculosis
QYSRADEEQ

SEQ ID NO: 51716 - protein, 9 aa, Mycobacterium tuberculosis
YSRADEEQQ

SEQ ID NO: 51717 - protein, 9 aa, Mycobacterium tuberculosis
SRADEEQQQ

SEQ ID NO: 51718 - protein, 9 aa, Mycobacterium tuberculosis
RADEEQQQA

SEQ ID NO: 51719 - protein, 9 aa, Mycobacterium tuberculosis
ADEEQQQAL

SEQ ID NO: 51720 - protein, 9 aa, Mycobacterium tuberculosis
DEEQQQALS

SEQ ID NO: 51721 - protein, 9 aa, Mycobacterium tuberculosis
EEQQQALSS

SEQ ID NO: 51722 - protein, 9 aa, Mycobacterium tuberculosis
EQQQALSSQ

SEQ ID NO: 51723 - protein, 9 aa, Mycobacterium tuberculosis
QQQALSSQM

SEQ ID NO: 51724 - protein, 9 aa, Mycobacterium tuberculosis
QQALSSQMG

SEQ ID NO: 51725 - protein, 9 aa, Mycobacterium tuberculosis
QALSSQMGF

SEQ ID NO: 51726 - protein, 10 aa, Mycobacterium tuberculosis
MAEMKTDAAT

SEQ ID NO: 51727 - protein, 10 aa, Mycobacterium tuberculosis
AEMKTDAATL

SEQ ID NO: 51728 - protein, 10 aa, Mycobacterium tuberculosis
EMKTDAATLA

SEQ ID NO: 51729 - protein, 10 aa, Mycobacterium tuberculosis
MKTDAATLAQ

SEQ ID NO: 51730 - protein, 10 aa, Mycobacterium tuberculosis
KTDAATLAQE

SEQ ID NO: 51731 - protein, 10 aa, Mycobacterium tuberculosis
TDAATLAQEA

SEQ ID NO: 51732 - protein, 10 aa, Mycobacterium tuberculosis
DAATLAQEAG

SEQ ID NO: 51733 - protein, 10 aa, Mycobacterium tuberculosis
AATLAQEAGN

SEQ ID NO: 51734 - protein, 10 aa, Mycobacterium tuberculosis
ATLAQEAGNF

SEQ ID NO: 51735 - protein, 10 aa, Mycobacterium tuberculosis
TLAQEAGNFE

SEQ ID NO: 51736 - protein, 10 aa, Mycobacterium tuberculosis
LAQEAGNFER

SEQ ID NO: 51737 - protein, 10 aa, Mycobacterium tuberculosis
AQEAGNFERI

SEQ ID NO: 51738 - protein, 10 aa, Mycobacterium tuberculosis
QEAGNFERIS

SEQ ID NO: 51739 - protein, 10 aa, Mycobacterium tuberculosis
EAGNFERISG

SEQ ID NO: 51740 - protein, 10 aa, Mycobacterium tuberculosis
AGNFERISGD

SEQ ID NO: 51741 - protein, 10 aa, Mycobacterium tuberculosis
GNFERISGDL

SEQ ID NO: 51742 - protein, 10 aa, Mycobacterium tuberculosis
NFERISGDLK

SEQ ID NO: 51743 - protein, 10 aa, Mycobacterium tuberculosis
FERISGDLKT

SEQ ID NO: 51744 - protein, 10 aa, Mycobacterium tuberculosis
ERISGDLKTQ

SEQ ID NO: 51745 - protein, 10 aa, Mycobacterium tuberculosis
RISGDLKTQI

SEQ ID NO: 51746 - protein, 10 aa, Mycobacterium tuberculosis
ISGDLKTQID

SEQ ID NO: 51747 - protein, 10 aa, Mycobacterium tuberculosis
SGDLKTQIDQ

SEQ ID NO: 51748 - protein, 10 aa, Mycobacterium tuberculosis
GDLKTQIDQV

SEQ ID NO: 51749 - protein, 10 aa, Mycobacterium tuberculosis
DLKTQIDQVE

SEQ ID NO: 51750 - protein, 10 aa, Mycobacterium tuberculosis
LKTQIDQVES

SEQ ID NO: 51751 - protein, 10 aa, Mycobacterium tuberculosis
KTQIDQVEST

SEQ ID NO: 51752 - protein, 10 aa, Mycobacterium tuberculosis
TQIDQVESTA

SEQ ID NO: 51753 - protein, 10 aa, Mycobacterium tuberculosis
QIDQVESTAG

SEQ ID NO: 51754 - protein, 10 aa, Mycobacterium tuberculosis
IDQVESTAGS

SEQ ID NO: 51755 - protein, 10 aa, Mycobacterium tuberculosis
DQVESTAGSL

SEQ ID NO: 51756 - protein, 10 aa, Mycobacterium tuberculosis
QVESTAGSLQ

SEQ ID NO: 51757 - protein, 10 aa, Mycobacterium tuberculosis
VESTAGSLQG

SEQ ID NO: 51758 - protein, 10 aa, Mycobacterium tuberculosis
ESTAGSLQGQ

SEQ ID NO: 51759 - protein, 10 aa, Mycobacterium tuberculosis
STAGSLQGQW

SEQ ID NO: 51760 - protein, 10 aa, Mycobacterium tuberculosis
TAGSLQGQWR

SEQ ID NO: 51761 - protein, 10 aa, Mycobacterium tuberculosis
AGSLQGQWRG

SEQ ID NO: 51762 - protein, 10 aa, Mycobacterium tuberculosis
GSLQGQWRGA

SEQ ID NO: 51763 - protein, 10 aa, Mycobacterium tuberculosis
SLQGQWRGAA

SEQ ID NO: 51764 - protein, 10 aa, Mycobacterium tuberculosis
LQGQWRGAAG

SEQ ID NO: 51765 - protein, 10 aa, Mycobacterium tuberculosis
QGQWRGAAGT

SEQ ID NO: 51766 - protein, 10 aa, Mycobacterium tuberculosis
GQWRGAAGTA

SEQ ID NO: 51767 - protein, 10 aa, Mycobacterium tuberculosis
QWRGAAGTAA

SEQ ID NO: 51768 - protein, 10 aa, Mycobacterium tuberculosis
WRGAAGTAAQ

SEQ ID NO: 51769 - protein, 10 aa, Mycobacterium tuberculosis
RGAAGTAAQA

SEQ ID NO: 51770 - protein, 10 aa, Mycobacterium tuberculosis
GAAGTAAQAA

SEQ ID NO: 51771 - protein, 10 aa, Mycobacterium tuberculosis
AAGTAAQAAV

SEQ ID NO: 51772 - protein, 10 aa, Mycobacterium tuberculosis
AGTAAQAAVV

SEQ ID NO: 51773 - protein, 10 aa, Mycobacterium tuberculosis
GTAAQAAVVR

SEQ ID NO: 51774 - protein, 10 aa, Mycobacterium tuberculosis
TAAQAAVVRF

SEQ ID NO: 51775 - protein, 10 aa, Mycobacterium tuberculosis
AAQAAVVRFQ

SEQ ID NO: 51776 - protein, 10 aa, Mycobacterium tuberculosis
AQAAVVRFQE

SEQ ID NO: 51777 - protein, 10 aa, Mycobacterium tuberculosis
QAAVVRFQEA

SEQ ID NO: 51778 - protein, 10 aa, Mycobacterium tuberculosis
AAVVRFQEAA

SEQ ID NO: 51779 - protein, 10 aa, Mycobacterium tuberculosis
AVVRFQEAAN

SEQ ID NO: 51780 - protein, 10 aa, Mycobacterium tuberculosis
VVRFQEAANK

SEQ ID NO: 51781 - protein, 10 aa, Mycobacterium tuberculosis
VRFQEAANKQ

SEQ ID NO: 51782 - protein, 10 aa, Mycobacterium tuberculosis
RFQEAANKQK

SEQ ID NO: 51783 - protein, 10 aa, Mycobacterium tuberculosis
FQEAANKQKQ

SEQ ID NO: 51784 - protein, 10 aa, Mycobacterium tuberculosis
QEAANKQKQE

SEQ ID NO: 51785 - protein, 10 aa, Mycobacterium tuberculosis
EAANKQKQEL

SEQ ID NO: 51786 - protein, 10 aa, Mycobacterium tuberculosis
AANKQKQELD

SEQ ID NO: 51787 - protein, 10 aa, Mycobacterium tuberculosis
ANKQKQELDE

SEQ ID NO: 51788 - protein, 10 aa, Mycobacterium tuberculosis
NKQKQELDEI

SEQ ID NO: 51789 - protein, 10 aa, Mycobacterium tuberculosis
KQKQELDEIS

SEQ ID NO: 51790 - protein, 10 aa, Mycobacterium tuberculosis
QKQELDEIST

SEQ ID NO: 51791 - protein, 10 aa, Mycobacterium tuberculosis
KQELDEISTN

SEQ ID NO: 51792 - protein, 10 aa, Mycobacterium tuberculosis
QELDEISTNI

SEQ ID NO: 51793 - protein, 10 aa, Mycobacterium tuberculosis
ELDEISTNIR

SEQ ID NO: 51794 - protein, 10 aa, Mycobacterium tuberculosis
LDEISTNIRQ

SEQ ID NO: 51795 - protein, 10 aa, Mycobacterium tuberculosis
DEISTNIRQA

SEQ ID NO: 51796 - protein, 10 aa, Mycobacterium tuberculosis
EISTNIRQAG

SEQ ID NO: 51797 - protein, 10 aa, Mycobacterium tuberculosis
ISTNIRQAGV

SEQ ID NO: 51798 - protein, 10 aa, Mycobacterium tuberculosis
STNIRQAGVQ

SEQ ID NO: 51799 - protein, 10 aa, Mycobacterium tuberculosis
TNIRQAGVQY

SEQ ID NO: 51800 - protein, 10 aa, Mycobacterium tuberculosis
NIRQAGVQYS

SEQ ID NO: 51801 - protein, 10 aa, Mycobacterium tuberculosis
IRQAGVQYSR

SEQ ID NO: 51802 - protein, 10 aa, Mycobacterium tuberculosis
RQAGVQYSRA

SEQ ID NO: 51803 - protein, 10 aa, Mycobacterium tuberculosis
QAGVQYSRAD

SEQ ID NO: 51804 - protein, 10 aa, Mycobacterium tuberculosis
AGVQYSRADE

SEQ ID NO: 51805 - protein, 10 aa, Mycobacterium tuberculosis
GVQYSRADEE

SEQ ID NO: 51806 - protein, 10 aa, Mycobacterium tuberculosis
VQYSRADEEQ

SEQ ID NO: 51807 - protein, 10 aa, Mycobacterium tuberculosis
QYSRADEEQQ

SEQ ID NO: 51808 - protein, 10 aa, Mycobacterium tuberculosis
YSRADEEQQQ

SEQ ID NO: 51809 - protein, 10 aa, Mycobacterium tuberculosis
SRADEEQQQA

SEQ ID NO: 51810 - protein, 10 aa, Mycobacterium tuberculosis
RADEEQQQAL

SEQ ID NO: 51811 - protein, 10 aa, Mycobacterium tuberculosis
ADEEQQQALS

SEQ ID NO: 51812 - protein, 10 aa, Mycobacterium tuberculosis
DEEQQQALSS

SEQ ID NO: 51813 - protein, 10 aa, Mycobacterium tuberculosis
EEQQQALSSQ

SEQ ID NO: 51814 - protein, 10 aa, Mycobacterium tuberculosis
EQQQALSSQM

SEQ ID NO: 51815 - protein, 10 aa, Mycobacterium tuberculosis
QQQALSSQMG

SEQ ID NO: 51816 - protein, 10 aa, Mycobacterium tuberculosis
QQALSSQMGF

SEQ ID NO: 51817 - protein, 11 aa, Mycobacterium tuberculosis
MAEMKTDAATL

SEQ ID NO: 51818 - protein, 11 aa, Mycobacterium tuberculosis
AEMKTDAATLA

SEQ ID NO: 51819 - protein, 11 aa, Mycobacterium tuberculosis
EMKTDAATLAQ

SEQ ID NO: 51820 - protein, 11 aa, Mycobacterium tuberculosis
MKTDAATLAQE

SEQ ID NO: 51821 - protein, 11 aa, Mycobacterium tuberculosis
KTDAATLAQEA

SEQ ID NO: 51822 - protein, 11 aa, Mycobacterium tuberculosis
TDAATLAQEAG

SEQ ID NO: 51823 - protein, 11 aa, Mycobacterium tuberculosis
DAATLAQEAGN

SEQ ID NO: 51824 - protein, 11 aa, Mycobacterium tuberculosis
AATLAQEAGNF

SEQ ID NO: 51825 - protein, 11 aa, Mycobacterium tuberculosis
ATLAQEAGNFE

SEQ ID NO: 51826 - protein, 11 aa, Mycobacterium tuberculosis
TLAQEAGNFER

SEQ ID NO: 51827 - protein, 11 aa, Mycobacterium tuberculosis
LAQEAGNFERI

SEQ ID NO: 51828 - protein, 11 aa, Mycobacterium tuberculosis
AQEAGNFERIS

SEQ ID NO: 51829 - protein, 11 aa, Mycobacterium tuberculosis
QEAGNFERISG

SEQ ID NO: 51830 - protein, 11 aa, Mycobacterium tuberculosis
EAGNFERISGD

SEQ ID NO: 51831 - protein, 11 aa, Mycobacterium tuberculosis
AGNFERISGDL

SEQ ID NO: 51832 - protein, 11 aa, Mycobacterium tuberculosis
GNFERISGDLK

SEQ ID NO: 51833 - protein, 11 aa, Mycobacterium tuberculosis
NFERISGDLKT

SEQ ID NO: 51834 - protein, 11 aa, Mycobacterium tuberculosis
FERISGDLKTQ

SEQ ID NO: 51835 - protein, 11 aa, Mycobacterium tuberculosis
ERISGDLKTQI

SEQ ID NO: 51836 - protein, 11 aa, Mycobacterium tuberculosis
RISGDLKTQID

SEQ ID NO: 51837 - protein, 11 aa, Mycobacterium tuberculosis
ISGDLKTQIDQ

SEQ ID NO: 51838 - protein, 11 aa, Mycobacterium tuberculosis
SGDLKTQIDQV

SEQ ID NO: 51839 - protein, 11 aa, Mycobacterium tuberculosis
GDLKTQIDQVE

SEQ ID NO: 51840 - protein, 11 aa, Mycobacterium tuberculosis
DLKTQIDQVES

SEQ ID NO: 51841 - protein, 11 aa, Mycobacterium tuberculosis
LKTQIDQVEST

SEQ ID NO: 51842 - protein, 11 aa, Mycobacterium tuberculosis
KTQIDQVESTA

SEQ ID NO: 51843 - protein, 11 aa, Mycobacterium tuberculosis
TQIDQVESTAG

SEQ ID NO: 51844 - protein, 11 aa, Mycobacterium tuberculosis
QIDQVESTAGS

SEQ ID NO: 51845 - protein, 11 aa, Mycobacterium tuberculosis
IDQVESTAGSL

SEQ ID NO: 51846 - protein, 11 aa, Mycobacterium tuberculosis
DQVESTAGSLQ

SEQ ID NO: 51847 - protein, 11 aa, Mycobacterium tuberculosis
QVESTAGSLQG

SEQ ID NO: 51848 - protein, 11 aa, Mycobacterium tuberculosis
VESTAGSLQGQ

SEQ ID NO: 51849 - protein, 11 aa, Mycobacterium tuberculosis
ESTAGSLQGQW

SEQ ID NO: 51850 - protein, 11 aa, Mycobacterium tuberculosis
STAGSLQGQWR

SEQ ID NO: 51851 - protein, 11 aa, Mycobacterium tuberculosis
TAGSLQGQWRG

SEQ ID NO: 51852 - protein, 11 aa, Mycobacterium tuberculosis
AGSLQGQWRGA

SEQ ID NO: 51853 - protein, 11 aa, Mycobacterium tuberculosis
GSLQGQWRGAA

SEQ ID NO: 51854 - protein, 11 aa, Mycobacterium tuberculosis
SLQGQWRGAAG

SEQ ID NO: 51855 - protein, 11 aa, Mycobacterium tuberculosis
LQGQWRGAAGT

SEQ ID NO: 51856 - protein, 11 aa, Mycobacterium tuberculosis
QGQWRGAAGTA

SEQ ID NO: 51857 - protein, 11 aa, Mycobacterium tuberculosis
GQWRGAAGTAA

SEQ ID NO: 51858 - protein, 11 aa, Mycobacterium tuberculosis
QWRGAAGTAAQ

SEQ ID NO: 51859 - protein, 11 aa, Mycobacterium tuberculosis
WRGAAGTAAQA

SEQ ID NO: 51860 - protein, 11 aa, Mycobacterium tuberculosis
RGAAGTAAQAA

SEQ ID NO: 51861 - protein, 11 aa, Mycobacterium tuberculosis
GAAGTAAQAAV

SEQ ID NO: 51862 - protein, 11 aa, Mycobacterium tuberculosis
AAGTAAQAAVV

SEQ ID NO: 51863 - protein, 11 aa, Mycobacterium tuberculosis
AGTAAQAAVVR

SEQ ID NO: 51864 - protein, 11 aa, Mycobacterium tuberculosis
GTAAQAAVVRF

SEQ ID NO: 51865 - protein, 11 aa, Mycobacterium tuberculosis
TAAQAAVVRFQ

SEQ ID NO: 51866 - protein, 11 aa, Mycobacterium tuberculosis
AAQAAVVRFQE

SEQ ID NO: 51867 - protein, 11 aa, Mycobacterium tuberculosis
AQAAVVRFQEA

SEQ ID NO: 51868 - protein, 11 aa, Mycobacterium tuberculosis
QAAVVRFQEAA

SEQ ID NO: 51869 - protein, 11 aa, Mycobacterium tuberculosis
AAVVRFQEAAN

SEQ ID NO: 51870 - protein, 11 aa, Mycobacterium tuberculosis
AVVRFQEAANK

SEQ ID NO: 51871 - protein, 11 aa, Mycobacterium tuberculosis
VVRFQEAANKQ

SEQ ID NO: 51872 - protein, 11 aa, Mycobacterium tuberculosis
VRFQEAANKQK

SEQ ID NO: 51873 - protein, 11 aa, Mycobacterium tuberculosis
RFQEAANKQKQ

SEQ ID NO: 51874 - protein, 11 aa, Mycobacterium tuberculosis
FQEAANKQKQE

SEQ ID NO: 51875 - protein, 11 aa, Mycobacterium tuberculosis
QEAANKQKQEL

SEQ ID NO: 51876 - protein, 11 aa, Mycobacterium tuberculosis
EAANKQKQELD

SEQ ID NO: 51877 - protein, 11 aa, Mycobacterium tuberculosis
AANKQKQELDE

SEQ ID NO: 51878 - protein, 11 aa, Mycobacterium tuberculosis
ANKQKQELDEI

SEQ ID NO: 51879 - protein, 11 aa, Mycobacterium tuberculosis
NKQKQELDEIS

SEQ ID NO: 51880 - protein, 11 aa, Mycobacterium tuberculosis
KQKQELDEIST

SEQ ID NO: 51881 - protein, 11 aa, Mycobacterium tuberculosis
QKQELDEISTN

SEQ ID NO: 51882 - protein, 11 aa, Mycobacterium tuberculosis
KQELDEISTNI

SEQ ID NO: 51883 - protein, 11 aa, Mycobacterium tuberculosis
QELDEISTNIR

SEQ ID NO: 51884 - protein, 11 aa, Mycobacterium tuberculosis
ELDEISTNIRQ

SEQ ID NO: 51885 - protein, 11 aa, Mycobacterium tuberculosis
LDEISTNIRQA

SEQ ID NO: 51886 - protein, 11 aa, Mycobacterium tuberculosis
DEISTNIRQAG

SEQ ID NO: 51887 - protein, 11 aa, Mycobacterium tuberculosis
EISTNIRQAGV

SEQ ID NO: 51888 - protein, 11 aa, Mycobacterium tuberculosis
ISTNIRQAGVQ

SEQ ID NO: 51889 - protein, 11 aa, Mycobacterium tuberculosis
STNIRQAGVQY

SEQ ID NO: 51890 - protein, 11 aa, Mycobacterium tuberculosis
TNIRQAGVQYS

SEQ ID NO: 51891 - protein, 11 aa, Mycobacterium tuberculosis
NIRQAGVQYSR

SEQ ID NO: 51892 - protein, 11 aa, Mycobacterium tuberculosis
IRQAGVQYSRA

SEQ ID NO: 51893 - protein, 11 aa, Mycobacterium tuberculosis
RQAGVQYSRAD

SEQ ID NO: 51894 - protein, 11 aa, Mycobacterium tuberculosis
QAGVQYSRADE

SEQ ID NO: 51895 - protein, 11 aa, Mycobacterium tuberculosis
AGVQYSRADEE

SEQ ID NO: 51896 - protein, 11 aa, Mycobacterium tuberculosis
GVQYSRADEEQ

SEQ ID NO: 51897 - protein, 11 aa, Mycobacterium tuberculosis
VQYSRADEEQQ

SEQ ID NO: 51898 - protein, 11 aa, Mycobacterium tuberculosis
QYSRADEEQQQ

SEQ ID NO: 51899 - protein, 11 aa, Mycobacterium tuberculosis
YSRADEEQQQA

SEQ ID NO: 51900 - protein, 11 aa, Mycobacterium tuberculosis
SRADEEQQQAL

SEQ ID NO: 51901 - protein, 11 aa, Mycobacterium tuberculosis
RADEEQQQALS

SEQ ID NO: 51902 - protein, 11 aa, Mycobacterium tuberculosis
ADEEQQQALSS

SEQ ID NO: 51903 - protein, 11 aa, Mycobacterium tuberculosis
DEEQQQALSSQ

SEQ ID NO: 51904 - protein, 11 aa, Mycobacterium tuberculosis
EEQQQALSSQM

SEQ ID NO: 51905 - protein, 11 aa, Mycobacterium tuberculosis
EQQQALSSQMG

SEQ ID NO: 51906 - protein, 11 aa, Mycobacterium tuberculosis
QQQALSSQMGF

SEQ ID NO: 51907 - protein, 13 aa, Mycobacterium tuberculosis
MAEMKTDAATLAQ

SEQ ID NO: 51908 - protein, 13 aa, Mycobacterium tuberculosis
AEMKTDAATLAQE

SEQ ID NO: 51909 - protein, 13 aa, Mycobacterium tuberculosis
EMKTDAATLAQEA

SEQ ID NO: 51910 - protein, 13 aa, Mycobacterium tuberculosis
MKTDAATLAQEAG

SEQ ID NO: 51911 - protein, 13 aa, Mycobacterium tuberculosis
KTDAATLAQEAGN

SEQ ID NO: 51912 - protein, 13 aa, Mycobacterium tuberculosis
TDAATLAQEAGNF

SEQ ID NO: 51913 - protein, 13 aa, Mycobacterium tuberculosis
DAATLAQEAGNFE

SEQ ID NO: 51914 - protein, 13 aa, Mycobacterium tuberculosis
AATLAQEAGNFER

SEQ ID NO: 51915 - protein, 13 aa, Mycobacterium tuberculosis
ATLAQEAGNFERI

SEQ ID NO: 51916 - protein, 13 aa, Mycobacterium tuberculosis
TLAQEAGNFERIS

SEQ ID NO: 51917 - protein, 13 aa, Mycobacterium tuberculosis
LAQEAGNFERISG

SEQ ID NO: 51918 - protein, 13 aa, Mycobacterium tuberculosis
AQEAGNFERISGD

SEQ ID NO: 51919 - protein, 13 aa, Mycobacterium tuberculosis
QEAGNFERISGDL

SEQ ID NO: 51920 - protein, 13 aa, Mycobacterium tuberculosis
EAGNFERISGDLK

SEQ ID NO: 51921 - protein, 13 aa, Mycobacterium tuberculosis
AGNFERISGDLKT

SEQ ID NO: 51922 - protein, 13 aa, Mycobacterium tuberculosis
GNFERISGDLKTQ

SEQ ID NO: 51923 - protein, 13 aa, Mycobacterium tuberculosis
NFERISGDLKTQI

SEQ ID NO: 51924 - protein, 13 aa, Mycobacterium tuberculosis
FERISGDLKTQID

SEQ ID NO: 51925 - protein, 13 aa, Mycobacterium tuberculosis
ERISGDLKTQIDQ

SEQ ID NO: 51926 - protein, 13 aa, Mycobacterium tuberculosis
RISGDLKTQIDQV

SEQ ID NO: 51927 - protein, 13 aa, Mycobacterium tuberculosis
ISGDLKTQIDQVE

SEQ ID NO: 51928 - protein, 13 aa, Mycobacterium tuberculosis
SGDLKTQIDQVES

SEQ ID NO: 51929 - protein, 13 aa, Mycobacterium tuberculosis
GDLKTQIDQVEST

SEQ ID NO: 51930 - protein, 13 aa, Mycobacterium tuberculosis
DLKTQIDQVESTA

SEQ ID NO: 51931 - protein, 13 aa, Mycobacterium tuberculosis
LKTQIDQVESTAG

SEQ ID NO: 51932 - protein, 13 aa, Mycobacterium tuberculosis
KTQIDQVESTAGS

SEQ ID NO: 51933 - protein, 13 aa, Mycobacterium tuberculosis
TQIDQVESTAGSL

SEQ ID NO: 51934 - protein, 13 aa, Mycobacterium tuberculosis
QIDQVESTAGSLQ

SEQ ID NO: 51935 - protein, 13 aa, Mycobacterium tuberculosis
IDQVESTAGSLQG

SEQ ID NO: 51936 - protein, 13 aa, Mycobacterium tuberculosis
DQVESTAGSLQGQ

SEQ ID NO: 51937 - protein, 13 aa, Mycobacterium tuberculosis
QVESTAGSLQGQW

SEQ ID NO: 51938 - protein, 13 aa, Mycobacterium tuberculosis
VESTAGSLQGQWR

SEQ ID NO: 51939 - protein, 13 aa, Mycobacterium tuberculosis
ESTAGSLQGQWRG

SEQ ID NO: 51940 - protein, 13 aa, Mycobacterium tuberculosis
STAGSLQGQWRGA

SEQ ID NO: 51941 - protein, 13 aa, Mycobacterium tuberculosis
TAGSLQGQWRGAA

SEQ ID NO: 51942 - protein, 13 aa, Mycobacterium tuberculosis
AGSLQGQWRGAAG

SEQ ID NO: 51943 - protein, 13 aa, Mycobacterium tuberculosis
GSLQGQWRGAAGT

SEQ ID NO: 51944 - protein, 13 aa, Mycobacterium tuberculosis
SLQGQWRGAAGTA

SEQ ID NO: 51945 - protein, 13 aa, Mycobacterium tuberculosis
LQGQWRGAAGTAA

SEQ ID NO: 51946 - protein, 13 aa, Mycobacterium tuberculosis
QGQWRGAAGTAAQ

SEQ ID NO: 51947 - protein, 13 aa, Mycobacterium tuberculosis
GQWRGAAGTAAQA

SEQ ID NO: 51948 - protein, 13 aa, Mycobacterium tuberculosis
QWRGAAGTAAQAA

SEQ ID NO: 51949 - protein, 13 aa, Mycobacterium tuberculosis
WRGAAGTAAQAAV

SEQ ID NO: 51950 - protein, 13 aa, Mycobacterium tuberculosis
RGAAGTAAQAAVV

SEQ ID NO: 51951 - protein, 13 aa, Mycobacterium tuberculosis
GAAGTAAQAAVVR

SEQ ID NO: 51952 - protein, 13 aa, Mycobacterium tuberculosis
AAGTAAQAAVVRF

SEQ ID NO: 51953 - protein, 13 aa, Mycobacterium tuberculosis
AGTAAQAAVVRFQ

SEQ ID NO: 51954 - protein, 13 aa, Mycobacterium tuberculosis
GTAAQAAVVRFQE

SEQ ID NO: 51955 - protein, 13 aa, Mycobacterium tuberculosis
TAAQAAVVRFQEA

SEQ ID NO: 51956 - protein, 13 aa, Mycobacterium tuberculosis
AAQAAVVRFQEAA

SEQ ID NO: 51957 - protein, 13 aa, Mycobacterium tuberculosis
AQAAVVRFQEAAN

SEQ ID NO: 51958 - protein, 13 aa, Mycobacterium tuberculosis
QAAVVRFQEAANK

SEQ ID NO: 51959 - protein, 13 aa, Mycobacterium tuberculosis
AAVVRFQEAANKQ

SEQ ID NO: 51960 - protein, 13 aa, Mycobacterium tuberculosis
AVVRFQEAANKQK

SEQ ID NO: 51961 - protein, 13 aa, Mycobacterium tuberculosis
VVRFQEAANKQKQ

SEQ ID NO: 51962 - protein, 13 aa, Mycobacterium tuberculosis
VRFQEAANKQKQE

SEQ ID NO: 51963 - protein, 13 aa, Mycobacterium tuberculosis
RFQEAANKQKQEL

SEQ ID NO: 51964 - protein, 13 aa, Mycobacterium tuberculosis
FQEAANKQKQELD

SEQ ID NO: 51965 - protein, 13 aa, Mycobacterium tuberculosis
QEAANKQKQELDE

SEQ ID NO: 51966 - protein, 13 aa, Mycobacterium tuberculosis
EAANKQKQELDEI

SEQ ID NO: 51967 - protein, 13 aa, Mycobacterium tuberculosis
AANKQKQELDEIS

SEQ ID NO: 51968 - protein, 13 aa, Mycobacterium tuberculosis
ANKQKQELDEIST

SEQ ID NO: 51969 - protein, 13 aa, Mycobacterium tuberculosis
NKQKQELDEISTN

SEQ ID NO: 51970 - protein, 13 aa, Mycobacterium tuberculosis
KQKQELDEISTNI

SEQ ID NO: 51971 - protein, 13 aa, Mycobacterium tuberculosis
QKQELDEISTNIR

SEQ ID NO: 51972 - protein, 13 aa, Mycobacterium tuberculosis
KQELDEISTNIRQ

SEQ ID NO: 51973 - protein, 13 aa, Mycobacterium tuberculosis
QELDEISTNIRQA

SEQ ID NO: 51974 - protein, 13 aa, Mycobacterium tuberculosis
ELDEISTNIRQAG

SEQ ID NO: 51975 - protein, 13 aa, Mycobacterium tuberculosis
LDEISTNIRQAGV

SEQ ID NO: 51976 - protein, 13 aa, Mycobacterium tuberculosis
DEISTNIRQAGVQ

SEQ ID NO: 51977 - protein, 13 aa, Mycobacterium tuberculosis
EISTNIRQAGVQY

SEQ ID NO: 51978 - protein, 13 aa, Mycobacterium tuberculosis
ISTNIRQAGVQYS

SEQ ID NO: 51979 - protein, 13 aa, Mycobacterium tuberculosis
STNIRQAGVQYSR

SEQ ID NO: 51980 - protein, 13 aa, Mycobacterium tuberculosis
TNIRQAGVQYSRA

SEQ ID NO: 51981 - protein, 13 aa, Mycobacterium tuberculosis
NIRQAGVQYSRAD

SEQ ID NO: 51982 - protein, 13 aa, Mycobacterium tuberculosis
IRQAGVQYSRADE

SEQ ID NO: 51983 - protein, 13 aa, Mycobacterium tuberculosis
RQAGVQYSRADEE

SEQ ID NO: 51984 - protein, 13 aa, Mycobacterium tuberculosis
QAGVQYSRADEEQ

SEQ ID NO: 51985 - protein, 13 aa, Mycobacterium tuberculosis
AGVQYSRADEEQQ

SEQ ID NO: 51986 - protein, 13 aa, Mycobacterium tuberculosis
GVQYSRADEEQQQ

SEQ ID NO: 51987 - protein, 13 aa, Mycobacterium tuberculosis
VQYSRADEEQQQA

SEQ ID NO: 51988 - protein, 13 aa, Mycobacterium tuberculosis
QYSRADEEQQQAL

SEQ ID NO: 51989 - protein, 13 aa, Mycobacterium tuberculosis
YSRADEEQQQALS

SEQ ID NO: 51990 - protein, 13 aa, Mycobacterium tuberculosis
SRADEEQQQALSS

SEQ ID NO: 51991 - protein, 13 aa, Mycobacterium tuberculosis
RADEEQQQALSSQ

SEQ ID NO: 51992 - protein, 13 aa, Mycobacterium tuberculosis
ADEEQQQALSSQM

SEQ ID NO: 51993 - protein, 13 aa, Mycobacterium tuberculosis
DEEQQQALSSQMG

SEQ ID NO: 51994 - protein, 13 aa, Mycobacterium tuberculosis
EEQQQALSSQMGF

SEQ ID NO: 51995 - protein, 14 aa, Mycobacterium tuberculosis
MAEMKTDAATLAQE

SEQ ID NO: 51996 - protein, 14 aa, Mycobacterium tuberculosis
AEMKTDAATLAQEA

SEQ ID NO: 51997 - protein, 14 aa, Mycobacterium tuberculosis
EMKTDAATLAQEAG

SEQ ID NO: 51998 - protein, 14 aa, Mycobacterium tuberculosis
MKTDAATLAQEAGN

SEQ ID NO: 51999 - protein, 14 aa, Mycobacterium tuberculosis
KTDAATLAQEAGNF

SEQ ID NO: 52000 - protein, 14 aa, Mycobacterium tuberculosis
TDAATLAQEAGNFE

SEQ ID NO: 52001 - protein, 14 aa, Mycobacterium tuberculosis
DAATLAQEAGNFER

SEQ ID NO: 52002 - protein, 14 aa, Mycobacterium tuberculosis
AATLAQEAGNFERI

SEQ ID NO: 52003 - protein, 14 aa, Mycobacterium tuberculosis
ATLAQEAGNFERIS

SEQ ID NO: 52004 - protein, 14 aa, Mycobacterium tuberculosis
TLAQEAGNFERISG

SEQ ID NO: 52005 - protein, 14 aa, Mycobacterium tuberculosis
LAQEAGNFERISGD

SEQ ID NO: 52006 - protein, 14 aa, Mycobacterium tuberculosis
AQEAGNFERISGDL

SEQ ID NO: 52007 - protein, 14 aa, Mycobacterium tuberculosis
QEAGNFERISGDLK

SEQ ID NO: 52008 - protein, 14 aa, Mycobacterium tuberculosis
EAGNFERISGDLKT

SEQ ID NO: 52009 - protein, 14 aa, Mycobacterium tuberculosis
AGNFERISGDLKTQ

SEQ ID NO: 52010 - protein, 14 aa, Mycobacterium tuberculosis
GNFERISGDLKTQI

SEQ ID NO: 52011 - protein, 14 aa, Mycobacterium tuberculosis
NFERISGDLKTQID

SEQ ID NO: 52012 - protein, 14 aa, Mycobacterium tuberculosis
FERISGDLKTQIDQ

SEQ ID NO: 52013 - protein, 14 aa, Mycobacterium tuberculosis
ERISGDLKTQIDQV

SEQ ID NO: 52014 - protein, 14 aa, Mycobacterium tuberculosis
RISGDLKTQIDQVE

SEQ ID NO: 52015 - protein, 14 aa, Mycobacterium tuberculosis
ISGDLKTQIDQVES

SEQ ID NO: 52016 - protein, 14 aa, Mycobacterium tuberculosis
SGDLKTQIDQVEST

SEQ ID NO: 52017 - protein, 14 aa, Mycobacterium tuberculosis
GDLKTQIDQVESTA

SEQ ID NO: 52018 - protein, 14 aa, Mycobacterium tuberculosis
DLKTQIDQVESTAG

SEQ ID NO: 52019 - protein, 14 aa, Mycobacterium tuberculosis
LKTQIDQVESTAGS

SEQ ID NO: 52020 - protein, 14 aa, Mycobacterium tuberculosis
KTQIDQVESTAGSL

SEQ ID NO: 52021 - protein, 14 aa, Mycobacterium tuberculosis
TQIDQVESTAGSLQ

SEQ ID NO: 52022 - protein, 14 aa, Mycobacterium tuberculosis
QIDQVESTAGSLQG

SEQ ID NO: 52023 - protein, 14 aa, Mycobacterium tuberculosis
IDQVESTAGSLQGQ

SEQ ID NO: 52024 - protein, 14 aa, Mycobacterium tuberculosis
DQVESTAGSLQGQW

SEQ ID NO: 52025 - protein, 14 aa, Mycobacterium tuberculosis
QVESTAGSLQGQWR

SEQ ID NO: 52026 - protein, 14 aa, Mycobacterium tuberculosis
VESTAGSLQGQWRG

SEQ ID NO: 52027 - protein, 14 aa, Mycobacterium tuberculosis
ESTAGSLQGQWRGA

SEQ ID NO: 52028 - protein, 14 aa, Mycobacterium tuberculosis
STAGSLQGQWRGAA

SEQ ID NO: 52029 - protein, 14 aa, Mycobacterium tuberculosis
TAGSLQGQWRGAAG

SEQ ID NO: 52030 - protein, 14 aa, Mycobacterium tuberculosis
AGSLQGQWRGAAGT

SEQ ID NO: 52031 - protein, 14 aa, Mycobacterium tuberculosis
GSLQGQWRGAAGTA

SEQ ID NO: 52032 - protein, 14 aa, Mycobacterium tuberculosis
SLQGQWRGAAGTAA

SEQ ID NO: 52033 - protein, 14 aa, Mycobacterium tuberculosis
LQGQWRGAAGTAAQ

SEQ ID NO: 52034 - protein, 14 aa, Mycobacterium tuberculosis
QGQWRGAAGTAAQA

SEQ ID NO: 52035 - protein, 14 aa, Mycobacterium tuberculosis
GQWRGAAGTAAQAA

SEQ ID NO: 52036 - protein, 14 aa, Mycobacterium tuberculosis
QWRGAAGTAAQAAV

SEQ ID NO: 52037 - protein, 14 aa, Mycobacterium tuberculosis
WRGAAGTAAQAAVV

SEQ ID NO: 52038 - protein, 14 aa, Mycobacterium tuberculosis
RGAAGTAAQAAVVR

SEQ ID NO: 52039 - protein, 14 aa, Mycobacterium tuberculosis
GAAGTAAQAAVVRF

SEQ ID NO: 52040 - protein, 14 aa, Mycobacterium tuberculosis
AAGTAAQAAVVRFQ

SEQ ID NO: 52041 - protein, 14 aa, Mycobacterium tuberculosis
AGTAAQAAVVRFQE

SEQ ID NO: 52042 - protein, 14 aa, Mycobacterium tuberculosis
GTAAQAAVVRFQEA

SEQ ID NO: 52043 - protein, 14 aa, Mycobacterium tuberculosis
TAAQAAVVRFQEAA

SEQ ID NO: 52044 - protein, 14 aa, Mycobacterium tuberculosis
AAQAAVVRFQEAAN

SEQ ID NO: 52045 - protein, 14 aa, Mycobacterium tuberculosis
AQAAVVRFQEAANK

SEQ ID NO: 52046 - protein, 14 aa, Mycobacterium tuberculosis
QAAVVRFQEAANKQ

SEQ ID NO: 52047 - protein, 14 aa, Mycobacterium tuberculosis
AAVVRFQEAANKQK

SEQ ID NO: 52048 - protein, 14 aa, Mycobacterium tuberculosis
AVVRFQEAANKQKQ

SEQ ID NO: 52049 - protein, 14 aa, Mycobacterium tuberculosis
VVRFQEAANKQKQE

SEQ ID NO: 52050 - protein, 14 aa, Mycobacterium tuberculosis
VRFQEAANKQKQEL

SEQ ID NO: 52051 - protein, 14 aa, Mycobacterium tuberculosis
RFQEAANKQKQELD

SEQ ID NO: 52052 - protein, 14 aa, Mycobacterium tuberculosis
FQEAANKQKQELDE

SEQ ID NO: 52053 - protein, 14 aa, Mycobacterium tuberculosis
QEAANKQKQELDEI

SEQ ID NO: 52054 - protein, 14 aa, Mycobacterium tuberculosis
EAANKQKQELDEIS

SEQ ID NO: 52055 - protein, 14 aa, Mycobacterium tuberculosis
AANKQKQELDEIST

SEQ ID NO: 52056 - protein, 14 aa, Mycobacterium tuberculosis
ANKQKQELDEISTN

SEQ ID NO: 52057 - protein, 14 aa, Mycobacterium tuberculosis
NKQKQELDEISTNI

SEQ ID NO: 52058 - protein, 14 aa, Mycobacterium tuberculosis
KQKQELDEISTNIR

SEQ ID NO: 52059 - protein, 14 aa, Mycobacterium tuberculosis
QKQELDEISTNIRQ

SEQ ID NO: 52060 - protein, 14 aa, Mycobacterium tuberculosis
KQELDEISTNIRQA

SEQ ID NO: 52061 - protein, 14 aa, Mycobacterium tuberculosis
QELDEISTNIRQAG

SEQ ID NO: 52062 - protein, 14 aa, Mycobacterium tuberculosis
ELDEISTNIRQAGV

SEQ ID NO: 52063 - protein, 14 aa, Mycobacterium tuberculosis
LDEISTNIRQAGVQ

SEQ ID NO: 52064 - protein, 14 aa, Mycobacterium tuberculosis
DEISTNIRQAGVQY

SEQ ID NO: 52065 - protein, 14 aa, Mycobacterium tuberculosis
EISTNIRQAGVQYS

SEQ ID NO: 52066 - protein, 14 aa, Mycobacterium tuberculosis
ISTNIRQAGVQYSR

SEQ ID NO: 52067 - protein, 14 aa, Mycobacterium tuberculosis
STNIRQAGVQYSRA

SEQ ID NO: 52068 - protein, 14 aa, Mycobacterium tuberculosis
TNIRQAGVQYSRAD

SEQ ID NO: 52069 - protein, 14 aa, Mycobacterium tuberculosis
NIRQAGVQYSRADE

SEQ ID NO: 52070 - protein, 14 aa, Mycobacterium tuberculosis
IRQAGVQYSRADEE

SEQ ID NO: 52071 - protein, 14 aa, Mycobacterium tuberculosis
RQAGVQYSRADEEQ

SEQ ID NO: 52072 - protein, 14 aa, Mycobacterium tuberculosis
QAGVQYSRADEEQQ

SEQ ID NO: 52073 - protein, 14 aa, Mycobacterium tuberculosis
AGVQYSRADEEQQQ

SEQ ID NO: 52074 - protein, 14 aa, Mycobacterium tuberculosis
GVQYSRADEEQQQA

SEQ ID NO: 52075 - protein, 14 aa, Mycobacterium tuberculosis
VQYSRADEEQQQAL

SEQ ID NO: 52076 - protein, 14 aa, Mycobacterium tuberculosis
QYSRADEEQQQALS

SEQ ID NO: 52077 - protein, 14 aa, Mycobacterium tuberculosis
YSRADEEQQQALSS

SEQ ID NO: 52078 - protein, 14 aa, Mycobacterium tuberculosis
SRADEEQQQALSSQ

SEQ ID NO: 52079 - protein, 14 aa, Mycobacterium tuberculosis
RADEEQQQALSSQM

SEQ ID NO: 52080 - protein, 14 aa, Mycobacterium tuberculosis
ADEEQQQALSSQMG

SEQ ID NO: 52081 - protein, 14 aa, Mycobacterium tuberculosis
DEEQQQALSSQMGF

SEQ ID NO: 52082 - protein, 15 aa, Mycobacterium tuberculosis
MAEMKTDAATLAQEA

SEQ ID NO: 52083 - protein, 15 aa, Mycobacterium tuberculosis
AEMKTDAATLAQEAG

SEQ ID NO: 52084 - protein, 15 aa, Mycobacterium tuberculosis
EMKTDAATLAQEAGN

SEQ ID NO: 52085 - protein, 15 aa, Mycobacterium tuberculosis
MKTDAATLAQEAGNF

SEQ ID NO: 52086 - protein, 15 aa, Mycobacterium tuberculosis
KTDAATLAQEAGNFE

SEQ ID NO: 52087 - protein, 15 aa, Mycobacterium tuberculosis
TDAATLAQEAGNFER

SEQ ID NO: 52088 - protein, 15 aa, Mycobacterium tuberculosis
DAATLAQEAGNFERI

SEQ ID NO: 52089 - protein, 15 aa, Mycobacterium tuberculosis
AATLAQEAGNFERIS

SEQ ID NO: 52090 - protein, 15 aa, Mycobacterium tuberculosis
ATLAQEAGNFERISG

SEQ ID NO: 52091 - protein, 15 aa, Mycobacterium tuberculosis
TLAQEAGNFERISGD

SEQ ID NO: 52092 - protein, 15 aa, Mycobacterium tuberculosis
LAQEAGNFERISGDL

SEQ ID NO: 52093 - protein, 15 aa, Mycobacterium tuberculosis
AQEAGNFERISGDLK

SEQ ID NO: 52094 - protein, 15 aa, Mycobacterium tuberculosis
QEAGNFERISGDLKT

SEQ ID NO: 52095 - protein, 15 aa, Mycobacterium tuberculosis
EAGNFERISGDLKTQ

SEQ ID NO: 52096 - protein, 15 aa, Mycobacterium tuberculosis
AGNFERISGDLKTQI

SEQ ID NO: 52097 - protein, 15 aa, Mycobacterium tuberculosis
GNFERISGDLKTQID

SEQ ID NO: 52098 - protein, 15 aa, Mycobacterium tuberculosis
NFERISGDLKTQIDQ

SEQ ID NO: 52099 - protein, 15 aa, Mycobacterium tuberculosis
FERISGDLKTQIDQV

SEQ ID NO: 52100 - protein, 15 aa, Mycobacterium tuberculosis
ERISGDLKTQIDQVE

SEQ ID NO: 52101 - protein, 15 aa, Mycobacterium tuberculosis
RISGDLKTQIDQVES

SEQ ID NO: 52102 - protein, 15 aa, Mycobacterium tuberculosis
ISGDLKTQIDQVEST

SEQ ID NO: 52103 - protein, 15 aa, Mycobacterium tuberculosis
SGDLKTQIDQVESTA

SEQ ID NO: 52104 - protein, 15 aa, Mycobacterium tuberculosis
GDLKTQIDQVESTAG

SEQ ID NO: 52105 - protein, 15 aa, Mycobacterium tuberculosis
DLKTQIDQVESTAGS

SEQ ID NO: 52106 - protein, 15 aa, Mycobacterium tuberculosis
LKTQIDQVESTAGSL

SEQ ID NO: 52107 - protein, 15 aa, Mycobacterium tuberculosis
KTQIDQVESTAGSLQ

SEQ ID NO: 52108 - protein, 15 aa, Mycobacterium tuberculosis
TQIDQVESTAGSLQG

SEQ ID NO: 52109 - protein, 15 aa, Mycobacterium tuberculosis
QIDQVESTAGSLQGQ

SEQ ID NO: 52110 - protein, 15 aa, Mycobacterium tuberculosis
IDQVESTAGSLQGQW

SEQ ID NO: 52111 - protein, 15 aa, Mycobacterium tuberculosis
DQVESTAGSLQGQWR

SEQ ID NO: 52112 - protein, 15 aa, Mycobacterium tuberculosis
QVESTAGSLQGQWRG

SEQ ID NO: 52113 - protein, 15 aa, Mycobacterium tuberculosis
VESTAGSLQGQWRGA

SEQ ID NO: 52114 - protein, 15 aa, Mycobacterium tuberculosis
ESTAGSLQGQWRGAA

SEQ ID NO: 52115 - protein, 15 aa, Mycobacterium tuberculosis
STAGSLQGQWRGAAG

SEQ ID NO: 52116 - protein, 15 aa, Mycobacterium tuberculosis
TAGSLQGQWRGAAGT

SEQ ID NO: 52117 - protein, 15 aa, Mycobacterium tuberculosis
AGSLQGQWRGAAGTA

SEQ ID NO: 52118 - protein, 15 aa, Mycobacterium tuberculosis
GSLQGQWRGAAGTAA

SEQ ID NO: 52119 - protein, 15 aa, Mycobacterium tuberculosis
SLQGQWRGAAGTAAQ

SEQ ID NO: 52120 - protein, 15 aa, Mycobacterium tuberculosis
LQGQWRGAAGTAAQA

SEQ ID NO: 52121 - protein, 15 aa, Mycobacterium tuberculosis
QGQWRGAAGTAAQAA

SEQ ID NO: 52122 - protein, 15 aa, Mycobacterium tuberculosis
GQWRGAAGTAAQAAV

SEQ ID NO: 52123 - protein, 15 aa, Mycobacterium tuberculosis
QWRGAAGTAAQAAVV

SEQ ID NO: 52124 - protein, 15 aa, Mycobacterium tuberculosis
WRGAAGTAAQAAVVR

SEQ ID NO: 52125 - protein, 15 aa, Mycobacterium tuberculosis
RGAAGTAAQAAVVRF

SEQ ID NO: 52126 - protein, 15 aa, Mycobacterium tuberculosis
GAAGTAAQAAVVRFQ

SEQ ID NO: 52127 - protein, 15 aa, Mycobacterium tuberculosis
AAGTAAQAAVVRFQE

SEQ ID NO: 52128 - protein, 15 aa, Mycobacterium tuberculosis
AGTAAQAAVVRFQEA

SEQ ID NO: 52129 - protein, 15 aa, Mycobacterium tuberculosis
GTAAQAAVVRFQEAA

SEQ ID NO: 52130 - protein, 15 aa, Mycobacterium tuberculosis
TAAQAAVVRFQEAAN

SEQ ID NO: 52131 - protein, 15 aa, Mycobacterium tuberculosis
AAQAAVVRFQEAANK

SEQ ID NO: 52132 - protein, 15 aa, Mycobacterium tuberculosis
AQAAVVRFQEAANKQ

SEQ ID NO: 52133 - protein, 15 aa, Mycobacterium tuberculosis
QAAVVRFQEAANKQK

SEQ ID NO: 52134 - protein, 15 aa, Mycobacterium tuberculosis
AAVVRFQEAANKQKQ

SEQ ID NO: 52135 - protein, 15 aa, Mycobacterium tuberculosis
AVVRFQEAANKQKQE

SEQ ID NO: 52136 - protein, 15 aa, Mycobacterium tuberculosis
VVRFQEAANKQKQEL

SEQ ID NO: 52137 - protein, 15 aa, Mycobacterium tuberculosis
VRFQEAANKQKQELD

SEQ ID NO: 52138 - protein, 15 aa, Mycobacterium tuberculosis
RFQEAANKQKQELDE

SEQ ID NO: 52139 - protein, 15 aa, Mycobacterium tuberculosis
FQEAANKQKQELDEI

SEQ ID NO: 52140 - protein, 15 aa, Mycobacterium tuberculosis
QEAANKQKQELDEIS

SEQ ID NO: 52141 - protein, 15 aa, Mycobacterium tuberculosis
EAANKQKQELDEIST

SEQ ID NO: 52142 - protein, 15 aa, Mycobacterium tuberculosis
AANKQKQELDEISTN

SEQ ID NO: 52143 - protein, 15 aa, Mycobacterium tuberculosis
ANKQKQELDEISTNI

SEQ ID NO: 52144 - protein, 15 aa, Mycobacterium tuberculosis
NKQKQELDEISTNIR

SEQ ID NO: 52145 - protein, 15 aa, Mycobacterium tuberculosis
KQKQELDEISTNIRQ

SEQ ID NO: 52146 - protein, 15 aa, Mycobacterium tuberculosis
QKQELDEISTNIRQA

SEQ ID NO: 52147 - protein, 15 aa, Mycobacterium tuberculosis
KQELDEISTNIRQAG

SEQ ID NO: 52148 - protein, 15 aa, Mycobacterium tuberculosis
QELDEISTNIRQAGV

SEQ ID NO: 52149 - protein, 15 aa, Mycobacterium tuberculosis
ELDEISTNIRQAGVQ

SEQ ID NO: 52150 - protein, 15 aa, Mycobacterium tuberculosis
LDEISTNIRQAGVQY

SEQ ID NO: 52151 - protein, 15 aa, Mycobacterium tuberculosis
DEISTNIRQAGVQYS

SEQ ID NO: 52152 - protein, 15 aa, Mycobacterium tuberculosis
EISTNIRQAGVQYSR

SEQ ID NO: 52153 - protein, 15 aa, Mycobacterium tuberculosis
ISTNIRQAGVQYSRA

SEQ ID NO: 52154 - protein, 15 aa, Mycobacterium tuberculosis
STNIRQAGVQYSRAD

SEQ ID NO: 52155 - protein, 15 aa, Mycobacterium tuberculosis
TNIRQAGVQYSRADE

SEQ ID NO: 52156 - protein, 15 aa, Mycobacterium tuberculosis
NIRQAGVQYSRADEE

SEQ ID NO: 52157 - protein, 15 aa, Mycobacterium tuberculosis
IRQAGVQYSRADEEQ

SEQ ID NO: 52158 - protein, 15 aa, Mycobacterium tuberculosis
RQAGVQYSRADEEQQ

SEQ ID NO: 52159 - protein, 15 aa, Mycobacterium tuberculosis
QAGVQYSRADEEQQQ

SEQ ID NO: 52160 - protein, 15 aa, Mycobacterium tuberculosis
AGVQYSRADEEQQQA

SEQ ID NO: 52161 - protein, 15 aa, Mycobacterium tuberculosis
GVQYSRADEEQQQAL

SEQ ID NO: 52162 - protein, 15 aa, Mycobacterium tuberculosis
VQYSRADEEQQQALS

SEQ ID NO: 52163 - protein, 15 aa, Mycobacterium tuberculosis
QYSRADEEQQQALSS

SEQ ID NO: 52164 - protein, 15 aa, Mycobacterium tuberculosis
YSRADEEQQQALSSQ

SEQ ID NO: 52165 - protein, 15 aa, Mycobacterium tuberculosis
SRADEEQQQALSSQM

SEQ ID NO: 52166 - protein, 15 aa, Mycobacterium tuberculosis
RADEEQQQALSSQMG

SEQ ID NO: 52167 - protein, 15 aa, Mycobacterium tuberculosis
ADEEQQQALSSQMGF

SEQ ID NO: 52168 - protein, 16 aa, Mycobacterium tuberculosis
MAEMKTDAATLAQEAG

SEQ ID NO: 52169 - protein, 16 aa, Mycobacterium tuberculosis
AEMKTDAATLAQEAGN

SEQ ID NO: 52170 - protein, 16 aa, Mycobacterium tuberculosis
EMKTDAATLAQEAGNF

SEQ ID NO: 52171 - protein, 16 aa, Mycobacterium tuberculosis
MKTDAATLAQEAGNFE

SEQ ID NO: 52172 - protein, 16 aa, Mycobacterium tuberculosis
KTDAATLAQEAGNFER

SEQ ID NO: 52173 - protein, 16 aa, Mycobacterium tuberculosis
TDAATLAQEAGNFERI

SEQ ID NO: 52174 - protein, 16 aa, Mycobacterium tuberculosis
DAATLAQEAGNFERIS

SEQ ID NO: 52175 - protein, 16 aa, Mycobacterium tuberculosis
AATLAQEAGNFERISG

SEQ ID NO: 52176 - protein, 16 aa, Mycobacterium tuberculosis
ATLAQEAGNFERISGD

SEQ ID NO: 52177 - protein, 16 aa, Mycobacterium tuberculosis
TLAQEAGNFERISGDL

SEQ ID NO: 52178 - protein, 16 aa, Mycobacterium tuberculosis
LAQEAGNFERISGDLK

SEQ ID NO: 52179 - protein, 16 aa, Mycobacterium tuberculosis
AQEAGNFERISGDLKT

SEQ ID NO: 52180 - protein, 16 aa, Mycobacterium tuberculosis
QEAGNFERISGDLKTQ

SEQ ID NO: 52181 - protein, 16 aa, Mycobacterium tuberculosis
EAGNFERISGDLKTQI

SEQ ID NO: 52182 - protein, 16 aa, Mycobacterium tuberculosis
AGNFERISGDLKTQID

SEQ ID NO: 52183 - protein, 16 aa, Mycobacterium tuberculosis
GNFERISGDLKTQIDQ

SEQ ID NO: 52184 - protein, 16 aa, Mycobacterium tuberculosis
NFERISGDLKTQIDQV

SEQ ID NO: 52185 - protein, 16 aa, Mycobacterium tuberculosis
FERISGDLKTQIDQVE

SEQ ID NO: 52186 - protein, 16 aa, Mycobacterium tuberculosis
ERISGDLKTQIDQVES

SEQ ID NO: 52187 - protein, 16 aa, Mycobacterium tuberculosis
RISGDLKTQIDQVEST

SEQ ID NO: 52188 - protein, 16 aa, Mycobacterium tuberculosis
ISGDLKTQIDQVESTA

SEQ ID NO: 52189 - protein, 16 aa, Mycobacterium tuberculosis
SGDLKTQIDQVESTAG

SEQ ID NO: 52190 - protein, 16 aa, Mycobacterium tuberculosis
GDLKTQIDQVESTAGS

SEQ ID NO: 52191 - protein, 16 aa, Mycobacterium tuberculosis
DLKTQIDQVESTAGSL

SEQ ID NO: 52192 - protein, 16 aa, Mycobacterium tuberculosis
LKTQIDQVESTAGSLQ

SEQ ID NO: 52193 - protein, 16 aa, Mycobacterium tuberculosis
KTQIDQVESTAGSLQG

SEQ ID NO: 52194 - protein, 16 aa, Mycobacterium tuberculosis
TQIDQVESTAGSLQGQ

SEQ ID NO: 52195 - protein, 16 aa, Mycobacterium tuberculosis
QIDQVESTAGSLQGQW

SEQ ID NO: 52196 - protein, 16 aa, Mycobacterium tuberculosis
IDQVESTAGSLQGQWR

SEQ ID NO: 52197 - protein, 16 aa, Mycobacterium tuberculosis
DQVESTAGSLQGQWRG

SEQ ID NO: 52198 - protein, 16 aa, Mycobacterium tuberculosis
QVESTAGSLQGQWRGA

SEQ ID NO: 52199 - protein, 16 aa, Mycobacterium tuberculosis
VESTAGSLQGQWRGAA

SEQ ID NO: 52200 - protein, 16 aa, Mycobacterium tuberculosis
ESTAGSLQGQWRGAAG

SEQ ID NO: 52201 - protein, 16 aa, Mycobacterium tuberculosis
STAGSLQGQWRGAAGT

SEQ ID NO: 52202 - protein, 16 aa, Mycobacterium tuberculosis
TAGSLQGQWRGAAGTA

SEQ ID NO: 52203 - protein, 16 aa, Mycobacterium tuberculosis
AGSLQGQWRGAAGTAA

SEQ ID NO: 52204 - protein, 16 aa, Mycobacterium tuberculosis
GSLQGQWRGAAGTAAQ

SEQ ID NO: 52205 - protein, 16 aa, Mycobacterium tuberculosis
SLQGQWRGAAGTAAQA

SEQ ID NO: 52206 - protein, 16 aa, Mycobacterium tuberculosis
LQGQWRGAAGTAAQAA

SEQ ID NO: 52207 - protein, 16 aa, Mycobacterium tuberculosis
QGQWRGAAGTAAQAAV

SEQ ID NO: 52208 - protein, 16 aa, Mycobacterium tuberculosis
GQWRGAAGTAAQAAVV

SEQ ID NO: 52209 - protein, 16 aa, Mycobacterium tuberculosis
QWRGAAGTAAQAAVVR

SEQ ID NO: 52210 - protein, 16 aa, Mycobacterium tuberculosis
WRGAAGTAAQAAVVRF

SEQ ID NO: 52211 - protein, 16 aa, Mycobacterium tuberculosis
RGAAGTAAQAAVVRFQ

SEQ ID NO: 52212 - protein, 16 aa, Mycobacterium tuberculosis
GAAGTAAQAAVVRFQE

SEQ ID NO: 52213 - protein, 16 aa, Mycobacterium tuberculosis
AAGTAAQAAVVRFQEA

SEQ ID NO: 52214 - protein, 16 aa, Mycobacterium tuberculosis
AGTAAQAAVVRFQEAA

SEQ ID NO: 52215 - protein, 16 aa, Mycobacterium tuberculosis
GTAAQAAVVRFQEAAN

SEQ ID NO: 52216 - protein, 16 aa, Mycobacterium tuberculosis
TAAQAAVVRFQEAANK

SEQ ID NO: 52217 - protein, 16 aa, Mycobacterium tuberculosis
AAQAAVVRFQEAANKQ

SEQ ID NO: 52218 - protein, 16 aa, Mycobacterium tuberculosis
AQAAVVRFQEAANKQK

SEQ ID NO: 52219 - protein, 16 aa, Mycobacterium tuberculosis
QAAVVRFQEAANKQKQ

SEQ ID NO: 52220 - protein, 16 aa, Mycobacterium tuberculosis
AAVVRFQEAANKQKQE

SEQ ID NO: 52221 - protein, 16 aa, Mycobacterium tuberculosis
AVVRFQEAANKQKQEL

SEQ ID NO: 52222 - protein, 16 aa, Mycobacterium tuberculosis
VVRFQEAANKQKQELD

SEQ ID NO: 52223 - protein, 16 aa, Mycobacterium tuberculosis
VRFQEAANKQKQELDE

SEQ ID NO: 52224 - protein, 16 aa, Mycobacterium tuberculosis
RFQEAANKQKQELDEI

SEQ ID NO: 52225 - protein, 16 aa, Mycobacterium tuberculosis
FQEAANKQKQELDEIS

SEQ ID NO: 52226 - protein, 16 aa, Mycobacterium tuberculosis
QEAANKQKQELDEIST

SEQ ID NO: 52227 - protein, 16 aa, Mycobacterium tuberculosis
EAANKQKQELDEISTN

SEQ ID NO: 52228 - protein, 16 aa, Mycobacterium tuberculosis
AANKQKQELDEISTNI

SEQ ID NO: 52229 - protein, 16 aa, Mycobacterium tuberculosis
ANKQKQELDEISTNIR

SEQ ID NO: 52230 - protein, 16 aa, Mycobacterium tuberculosis
NKQKQELDEISTNIRQ

SEQ ID NO: 52231 - protein, 16 aa, Mycobacterium tuberculosis
KQKQELDEISTNIRQA

SEQ ID NO: 52232 - protein, 16 aa, Mycobacterium tuberculosis
QKQELDEISTNIRQAG

SEQ ID NO: 52233 - protein, 16 aa, Mycobacterium tuberculosis
KQELDEISTNIRQAGV

SEQ ID NO: 52234 - protein, 16 aa, Mycobacterium tuberculosis
QELDEISTNIRQAGVQ

SEQ ID NO: 52235 - protein, 16 aa, Mycobacterium tuberculosis
ELDEISTNIRQAGVQY

SEQ ID NO: 52236 - protein, 16 aa, Mycobacterium tuberculosis
LDEISTNIRQAGVQYS

SEQ ID NO: 52237 - protein, 16 aa, Mycobacterium tuberculosis
DEISTNIRQAGVQYSR

SEQ ID NO: 52238 - protein, 16 aa, Mycobacterium tuberculosis
EISTNIRQAGVQYSRA

SEQ ID NO: 52239 - protein, 16 aa, Mycobacterium tuberculosis
ISTNIRQAGVQYSRAD

SEQ ID NO: 52240 - protein, 16 aa, Mycobacterium tuberculosis
STNIRQAGVQYSRADE

SEQ ID NO: 52241 - protein, 16 aa, Mycobacterium tuberculosis
TNIRQAGVQYSRADEE

SEQ ID NO: 52242 - protein, 16 aa, Mycobacterium tuberculosis
NIRQAGVQYSRADEEQ

SEQ ID NO: 52243 - protein, 16 aa, Mycobacterium tuberculosis
IRQAGVQYSRADEEQQ

SEQ ID NO: 52244 - protein, 16 aa, Mycobacterium tuberculosis
RQAGVQYSRADEEQQQ

SEQ ID NO: 52245 - protein, 16 aa, Mycobacterium tuberculosis
QAGVQYSRADEEQQQA

SEQ ID NO: 52246 - protein, 16 aa, Mycobacterium tuberculosis
AGVQYSRADEEQQQAL

SEQ ID NO: 52247 - protein, 16 aa, Mycobacterium tuberculosis
GVQYSRADEEQQQALS

SEQ ID NO: 52248 - protein, 16 aa, Mycobacterium tuberculosis
VQYSRADEEQQQALSS

SEQ ID NO: 52249 - protein, 16 aa, Mycobacterium tuberculosis
QYSRADEEQQQALSSQ

SEQ ID NO: 52250 - protein, 16 aa, Mycobacterium tuberculosis
YSRADEEQQQALSSQM

SEQ ID NO: 52251 - protein, 16 aa, Mycobacterium tuberculosis
SRADEEQQQALSSQMG

SEQ ID NO: 52252 - protein, 16 aa, Mycobacterium tuberculosis
RADEEQQQALSSQMGF
